(19) United States
(12) Patent Application Publication
(10) Pub. No.: US 2025/0339559 A1
(43) Pub. Date: Nov. 6, 2025

(54) BASE EDITING-MEDIATED READTHROUGH OF PREMATURE TERMINATION CODONS (BERT)

(71) Applicants: The Broad Institute, Inc., Cambridge, MA (US); President and Fellows of Harvard College, Cambridge, MA (US)

(72) Inventors: David R. Liu, Cambridge, MA (US); Steven Erwood, Cambridge, MA (US); Aditya Raguram, Cambridge, MA (US)

(73) Assignees: The Broad Institute, Inc., Cambridge, MA (US); President and Fellows of Harvard College, Cambridge, MA (US)

(21) Appl. No.: 19/271,651

(22) Filed: Jul. 16, 2025

Related U.S. Application Data
(63) Continuation of application No. PCT/US2024/011896, filed on Jan. 17, 2024.
(60) Provisional application No. 63/480,499, filed on Jan. 18, 2023.

(51) Int. Cl. A61K 48/00; C12N 9/02; C12N 9/10; C12N 9/22; C12N 9/78; C12N 15/11

(52) U.S. Cl. CPC A61K 48/005; C12N 9/0036; C12N 9/1007; C12N 9/1048; C12N 9/226; C12N 9/78; C12N 15/111; C07K 2319/80; C12N 2310/20; C12Y 106/03001; C12Y 201/01056; C12Y 201/01063; C12Y 305/04002; C12Y 305/04003; C12Y 305/04005

(57) ABSTRACT

Aspects of the disclosure relate to methods, compositions, and systems for editing a DNA sequence encoding an endogenous tRNA into a suppressor tRNA using base editing (e.g., to treat a disease caused by a premature termination codon or PTC). Additional aspects relate to compositions comprising a gRNA configured to bind to a DNA sequence encoding an endogenous tRNA. Other aspects relate to complexes comprising a base editor and a gRNA that are capable of editing an endogenous tRNA into a suppressor tRNA. In some aspects, the disclosure further relates to polynucleotides encoding one or more nucleic acid sequences encoding the gRNAs, vectors comprising the polynucleotides, and/or cells comprising the polynucleotides, complexes, gRNAs, and/or vectors disclosed herein. Additional aspects further relate to kits comprising any one of the compositions, complexes, gRNAs, polynucleotides, vectors, and/or cells disclosed herein.

### RELATED APPLICATIONS

[0001] This application claims priority under 35 U.S.C. § 119(e) to U.S. Provisional Application, U.S. Ser. No. 63/480,499, filed Jan. 18, 2023, which is incorporated herein by reference.

### GOVERNMENT SUPPORT

[0002] This invention was made with government support under R35GM118062 awarded by NIH MIRA. The government has certain rights in the invention.

### REFERENCE TO AN ELECTRONIC SEQUENCE LISTING

[0003] The contents of the electronic sequence listing (Filename; Size: 2,249,959 bytes; and Date of Creation: Jan. 15, 2024) is herein incorporated by reference in its entirety.

### BACKGROUND OF INVENTION

[0004] Nonsense mutations in genomic DNA lead to premature termination codons (PTCs) in mRNAs, which in turn impede translation of full-length proteins. Diminished translation of full-length proteins due to PTCs can induce pathogenic effects in cells and organisms. Indeed, approximately 33% of known human genetic diseases and 11% of known pathogenic gene variants are caused by PTCs (e.g., cystic fibrosis, beta thalassaemia, Hurler syndrome, Dravet syndrome, Duchenne muscular dystrophy, Usher syndrome, and hemophilia). Interestingly, many bacteria and viruses utilize suppressor tRNAs to enable translational stop codon readthrough (e.g., the ribosome goes past the stop codon and continues translating the mRNA into protein). However, suppressor tRNAs do not naturally occur in the human body. Base editing allows for precise editing of the genomic DNA encoding the PTCs and may provide a platform for the treatment of diseases associated with PTCs.

### SUMMARY OF INVENTION

[0005] Aspects of the disclosure relate to methods, compositions, and systems for editing a DNA sequence encoding an endogenous tRNA into a suppressor tRNA using base editing (e.g., to treat a disease caused by a premature termination codon or PTC). Additional aspects relate to compositions comprising a gRNA configured to bind to a DNA sequence encoding an endogenous tRNA. Other aspects relate to complexes comprising a base editor and a gRNA that are capable of editing an endogenous tRNA into a suppressor tRNA. In some aspects, the disclosure further relates to polynucleotides encoding one or more nucleic acid sequences encoding the gRNAs, vectors comprising the polynucleotides, and/or cells comprising the polynucleotides, complexes, gRNAs, and/or vectors disclosed herein. Additional aspects further relate to kits comprising any one of the compositions, complexes, gRNAs, polynucleotides, vectors, and/or cells disclosed herein.

[0006] As defined elsewhere herein, suppressor tRNAs are tRNAs that are natively charged with their cognate amino acids but possess engineered anticodon loops designed to bind PTCs (e.g., amber, ochre, or opal stop codons). As such, suppressor tRNAs bind to PTCs during the process of translation, leading to incorporation of an amino acid instead of terminating translation. Without wishing to be bound by any particular theory, suppressor tRNAs were recently used to rescue a genetic disease in a mouse model carrying a nonsense mutation^{8,9}, but the suppressor tRNA was delivered via an adeno-associated viral vector (herein “AAV”). Permanent expression of the suppressor tRNA is necessary for continued rescue of the disease, which is challenging to achieve using AAV and requires repeated administration of the suppressor tRNA vector.

[0007] Humans possess over 500 interspersed tRNA genes, and many of these genes are redundant and dispensable¹¹. For example, one or both copies of the tRNA^{Lys} CUU gene is deleted in ˜50% of humans¹². Therefore, using base editing to convert the CUU anticodon of the tRNA^{Lys} gene into UUA, UCA, or CUA for ochre, opal, and amber suppression, respectively, would generate an endogenous suppressor tRNA^{Lys}. Thus, in some embodiments, the endogenous tRNA converted into a suppressor tRNA is a tRNA^{Lys} CUU gene. In this particular embodiment, lysine would be installed at the locations of the PTCs. In other embodiments, the tRNA gene is any redundant and dispensable tRNA gene known in the art. In other embodiments, the tRNA gene is any redundant and indispensable gene known in the art. (see Table 1 for a list of all and non human tRNA genes)

[0008] In other embodiments, other domains in the tRNA gene may also be edited, either alone or in addition to editing the anticodon. For example, in some embodiments, base editing may be used to alter the (i) the anticodon sequence of a tRNA, (ii) the identity of the amino acid attached to a tRNA, or (iii) both the anticodon sequence of the tRNA and the identity of the amino acid attached to the tRNA. Any known edit in the art may be used to alter the identity of the charged amino acid. For example, in some embodiments, base editing is used to install a C70U mutation in the acceptor stem of tRNA^{Lys}; this mutation is known to change the identity of the charged amino acid to alanine. Other edits within the acceptor stem domain and/or other domains (e.g., D-arm, T-arm, or variable arm) may also be used to alter the identity of the charged amino acid.

[0009] In some embodiments, the choice of amino acid inserted at a stop codon is tailored by the choice of tRNA to edit and/or by installing sequences recognized by specific aminoacyl-tRNA synthetases to direct amino acid charging of the newly generated suppressor tRNA. In some embodiments, suppression with widely tolerated amino acids such as glycine, alanine, or serine may be preferable to suppression with more unusual amino acids such as proline or arginine or tryptophan, except when treating diseases caused by premature stop codons that have arisen from mutation of these amino acids. For example, in certain embodiments, arginine to STOP mutations (e.g. 5′-CGA-3′ mutation to 5′-UGA-3′) are a common cause of genetic diseases, and in these cases, base editing to create an arginine-charged suppressor tRNA may be desirable.

[0010] As such, some aspects of the present disclosure are related to methods for editing a DNA sequence encoding an endogenous tRNA at a target site. In some embodiments, the target site in the DNA sequence encodes one or more domains of the endogenous tRNA. tRNA domains are known in the art and comprise the D-arm domain, T-arm domain, variable arm domain, acceptor stem domain (e.g., C70U), and an anticodon arm domain comprising an anticodon sequence (FIG. 3).

[0011] In some embodiments, the endogenous tRNA anticodon sequence is a single transition mutation away from a nonsense suppressor anticodon. As defined elsewhere herein, a nonsense suppressor anticodon is the complementary sequence to a premature termination codon or PTC. There are currently three known PTCs, each of which, comprises a different sequence. The ochre stop codon has sequence 5′-UAA-3′ and corresponds to nonsense suppressor anticodon with sequence 5′-UUA-3′. The opal stop codon has sequence 5′-UGA-3′ and corresponds to the nonsense suppressor anticodon with sequence 5′-UCA-3′. The amber stop codon has sequence 5′-UAG-3′ and corresponds to nonsense suppressor anticodon with sequence 5′-CUA-3′.

[0012] In some embodiments, the endogenous tRNA comprises an anticodon sequence that is a single transversion mutation away from a nonsense suppressor anticodon. The single transversion mutation may be any transversion mutation known in the art.

[0013] In some embodiments, the endogenous tRNA comprises an anticodon sequence that is 3′-X1-X2-X3-5′. In some embodiments, the base editor installs the mutation (e.g., transition or transversion) at position XL. In some embodiments, the base editor installs the mutation (e.g., transition or transversion) at position X2. In some embodiments, the base editor installs the mutation (e.g., transition or transversion) at position X3.

[0014] Other aspects of the present disclosure relate to edited tRNAs described herein. While it is generally known that translational stop codon readthrough provides a regulatory mechanism of gene expression this extensively utilized by positive-sense ssRNA viruses, no such mechanism has been observed in humans. In other words, suppressor tRNAs are not naturally found and/or naturally occurring in humans. Thus, in some embodiments, the disclosure relates to one or more suppressor tRNAs engineered from endogenous tRNAs. In some embodiments, the suppressor tRNA comprises a nonsense suppressor anticodon sequence selected from the group consisting of 5′-UUA-3′, 5′-UCA-3′ and 5′-CUA-3′. In some embodiments, the suppressor tRNA further comprises an amino acid selected from the group consisting of alanine, arginine, asparagine, aspartic acid, cysteine, glutamine, glutamic acid, glycine, histidine, isoleucine, leucine, methionine, phenylalanine, proline, serine, threonine, tryptophan, tyrosine, valine, pyrrolysine, and selenocysteine.

[0015] Additional aspects of the disclosure relate to guide RNAs configured to bind to DNA sequences encoding endogenous tRNA sequences.

[0016] Complexes comprising the gRNA and a base editor are also contemplated herein. In some embodiments, the gRNA comprises a spacer sequence configured to bind to a DNA sequence encoding an endogenous tRNA. In some embodiments the spacer sequence is any sequence listed in Table 2.

[0017] Other aspects of the disclosure relate to polynucleotides. For example, in some aspects, the disclosure relates to a polynucleotide comprising a first nucleic acid sequence encoding a base editor and a second nucleic acid sequence encoding a guide RNA, wherein the guide RNA comprises a spacer sequence configured to bind to one or more tRNA genes (e.g., see Table 2). In some embodiments, the polynucleotide comprises a first nucleic acid sequence encoding a guide RNA configured to bind to a DNA sequence encoding an endogenous tRNA.

[0018] Aspects of the disclosure also relate to vector systems comprising one or more vectors, or vectors as such. Vectors may be designed to clone and/or express the base editors as disclosed herein. Vectors may also be designed to clone and/or express one or more gRNAs having complementarity to the target sequence, as disclosed herein. Vectors may also be designed to transfect the base editors and gRNAs of the disclosure into one or more cells, e.g., a target diseased eukaryotic cell for treatment with the base editor systems and methods disclosed herein.

[0019] In some aspects, the disclosure relates to cells comprising any one of the polynucleotides, gRNAs, vectors, edited tRNAs, or complexes disclosed herein. In some embodiments, the cell is an animal cell. In some embodiments, the animal cell is a mammalian cell, a non-human primate cell, or a human cell. In other embodiments, the cell is a plant cell.

[0020] In some aspects, the disclosure relates to pharmaceutical compositions comprising any one of pegRNAs, complexes, vectors, edited tRNAs, polynucleotides, and cells disclosed herein, or any combination thereof, and a pharmaceutical excipient.

[0021] In some aspects, the disclosure relates to kits comprising any one of the compositions, guide RNAs, complexes, polynucleotides, and cells disclose herein, or any combination thereof, and instructions for editing a one or more DNA sequences encoding one or more domains of a tRNA by base editing, wherein the DNA sequence is any sequence that encodes a tRNA (e.g., see Table 1). In some embodiments, the kit further comprises a pharmaceutical excipient.

[0022] Other aspects of the disclosure relate to methods for changing the amino acid that is charged onto an endogenous tRNA using base editing. Without wishing to be bound by any particular theory, it is generally recognized in the art that mutation of select nucleotides within one or more domains of the endogenous tRNA alters the aminoacyl-tRNA synthetase that recognizes the endogenous tRNA, and hence, charges the tRNA with a non-cognate amino acid. See for example, Liu et al., “Engineering a tRNA and aminoacyl-tRNA synthetase for the site specific incorporation of unnatural amino acids into protein in vivo” PNAS, 1997, 94 (19) 10092-10097, which is incorporated herein by reference in its entirety. For example, tRNAs comprising a C70U mutation in the acceptor stem domain are charged alanine, regardless of their anticodon sequence. Thus, in some embodiments, the tRNAs edited with the base editors described herein, comprises an anticodon sequence that encodes for the cognate amino acid but are charged with a non-cognate amino acid.

[0023] Additional aspects of the disclosure relate to methods for producing a suppressor tRNA molecules from an endogenous tRNA molecule using base editing in a subject in need thereof, the method comprising administering to the subject: (i) a base editor and (ii) a guide RNA, wherein the base editor and the gRNA install a mutation, as described herein, at a target site in a DNA sequence encoding the tRNA molecule, wherein installation of the mutation converts the endogenous tRNA molecule into the suppressor tRNA molecule.

[0024] Other aspects relate to methods of treating a disease caused by premature termination codons in a subject in need thereof, the method comprising administering to the subject (i) a base editor and (ii) a guide RNA, wherein the base editor and guide RNA form a base editor complex, wherein the base editor complex mutates a target DNA sequence encoding one or more domains of a tRNA to produce a suppressor tRNA, wherein the suppressor tRNA comprises an anticodon sequence complementary to an ochre stop codon, an opal stop codon, or an amber stop codon.

### BRIEF DESCRIPTION OF THE DRAWINGS

[0025] FIG. 1 illustrates the conversion of Gln-TTG-4-1 and Gln-CTG-6-1 into suppressor tRNAs Gln-TTA-4-1 and Gln-CTA-6-1 using base editors, respectively. Approximately 20% of the sequenced reads had the specified edit.

[0026] FIG. 2A illustrates the conversion of GLN-CTG-6-1 into the suppressor tRNA Gln-CTA-6-1. FIG. 2B illustrates the ability of the suppressor tRNA Gln-CTA-6-1 to edit a reported plasmid encoding an eGFP cassette with the corresponding premature termination codon.

[0027] FIG. 3 shows a representative schematic of an exemplary endogenous tRNA. Relevant domains include the D-arm domain (e.g., D-loop), acceptor stem domain, T-arm domain (e.g., TΨC loop), variable arm domain (e.g., variable loop), and the anticodon arm domain encoding the anticodon sequence (e.g., anticodon loop) (SEQ ID NO: 2491).

### DEFINITIONS

[0028] As used herein and in the claims, the singular forms “a,” “an,” and “the” include the singular and the plural reference unless the context clearly indicates otherwise. Thus, for example, a reference to “an agent” includes a single agent and a plurality of such agents.

[0029] The term “base editor (BE)” as used herein, refers to an agent comprising a polypeptide that is capable of making a modification to a base (e.g., A, T, C, G, or U) within a nucleic acid sequence (e.g., DNA or RNA) that converts one base to another (e.g., A to G, A to C, A to T, C to T, C to G, C to A, G to A, G to C, G to T, T to A, T to C, T to G). In some embodiments, the base editor is capable of deaminating a base within a nucleic acid such as a base within a DNA molecule. In the case of an adenine base editor, the base editor is capable of deaminating an adenine (A) in DNA. Such base editors may include a nucleic acid programmable DNA binding protein (napDNAbp) fused to an adenosine deaminase. Some base editors include CRISPR-mediated fusion proteins that are utilized in the base editing methods described herein. In some embodiments, the base editor comprises a nuclease-inactive Cas9 (dCas9) fused to a deaminase which binds a nucleic acid in a guide RNA-programmed manner via the formation of an R-loop, but does not cleave the nucleic acid. For example, the dCas9 domain of the fusion protein may include a D10A and a H840A mutation (which renders Cas9 capable of cleaving only one strand of a nucleic acid duplex), as described in PCT/US2016/058344, which published as WO 2017/070632 on Apr. 27, 2017, and is incorporated herein by reference in its entirety. The DNA cleavage domain of S. pyogenes Cas9 includes two subdomains, the HNH nuclease subdomain and the RuvC1 subdomain. The HNH subdomain cleaves the strand complementary to the gRNA (the “targeted strand”, or the strand in which editing or deamination occurs), whereas the RuvC1 subdomain cleaves the non-complementary strand containing the PAM sequence (the “non-edited strand”). The RuvC1 mutant D10A generates a nick in the targeted strand, while the HNH mutant H840A generates a nick on the non-edited strand (see Jinek et al., Science, 337:816-821(2012); Qi et al., Cell. 28; 152(5):1173-83 (2013)).

[0030] In some embodiments, a nucleobase editor is a macromolecule or macromolecular complex that results primarily (e.g., more than 80%, more than 85%, more than 90%, more than 95%, more than 99%, more than 99.9%, or 100%) in the conversion of a nucleobase in a polynucleic acid sequence into another nucleobase (i.e., a transition or transversion) using a combination of 1) a nucleotide-, nucleoside-, or nucleobase-modifying enzyme; and 2) a nucleic acid binding protein that can be programmed to bind to a specific nucleic acid sequence.

[0031] In some embodiments, the nucleobase editor comprises a DNA binding domain (e.g., a programmable DNA binding domain such as a dCas9 or nCas9) that directs it to a target sequence. In some embodiments, the nucleobase editor comprises a nucleobase modifying enzyme fused to a programmable DNA binding domain (e.g., a dCas9 or nCas9). A “nucleobase modifying enzyme” is an enzyme that can modify a nucleobase and convert one nucleobase to another (e.g., a deaminase such as a cytidine deaminase or an adenosine deaminase). In some embodiments, the nucleobase editor may target cytosine (C) bases in a nucleic acid sequence and convert the C to thymine (T) base. In some embodiments, the C to T editing is carried out by a deaminase, e.g., a cytidine deaminase. Base editors that can carry out other types of base conversions (e.g., adenosine (A) to guanine (G), C to G) are also contemplated.

[0032] Nucleobase editors that convert a C to T, in some embodiments, comprise a cytidine deaminase. A “cytidine deaminase” refers to an enzyme that catalyzes the chemical reaction “cytosine+H₂O→uracil+NH₃” or “5-methyl-cytosine+H2O→thymine+NH₃.” As it may be apparent from the reaction formula, such chemical reactions result in a C to U/T nucleobase change. In the context of a gene, such a nucleotide change, or mutation, may in turn lead to an amino acid change in the protein, which may affect the protein's function, e.g., loss-of-function or gain-of-function. In some embodiments, the C to T nucleobase editor comprises a dCas9 or nCas9 fused to a cytidine deaminase. In some embodiments, the cytidine deaminase domain is fused to the N-terminus of the dCas9 or nCas9. In some embodiments, the nucleobase editor further comprises a domain that inhibits uracil glycosylase, and/or a nuclear localization signal. Such nucleobase editors have been described in the art, e.g., in Rees & Liu, Nat Rev Genet. 2018; 19(12):770-788 and Koblan et al., Nat Biotechnol. 2018; 36(9):843-846; as well as U.S. Patent Publication No. 2018/0073012, published Mar. 15, 2018, which issued as U.S. Pat. No. 10,113,163; on Oct. 30, 2018; U.S. Patent Publication No. 2017/0121693, published May 4, 2017, which issued as U.S. Pat. No. 10,167,457 on Jan. 1, 2019; International Publication No. WO 2017/070633, published Apr. 27, 2017; U.S. Patent Publication No. 2015/0166980, published Jun. 18, 2015; U.S. Pat. No. 9,840,699, issued Dec. 12, 2017; U.S. Pat. No. 10,077,453, issued Sep. 18, 2018; International Publication No. WO 2019/023680, published Jan. 31, 2019; International Publication No. WO 2018/0176009, published Sep. 27, 2018, International Application No PCT/US2019/033848, filed May 23, 2019, International Application No. PCT/US2019/47996, filed Aug. 23, 2019; International Application No. PCT/US2019/049793, filed Sep. 5, 2019; U.S. Provisional Application No. 62/835,490, filed Apr. 17, 2019; International Application No. PCT/US2019/61685, filed Nov. 15, 2019; International Application No. PCT/US2019/57956, filed Oct. 24, 2019; U.S. Provisional Application No. 62/858,958, filed Jun. 7, 2019; International Publication No. PCT/US2019/58678, filed Oct. 29, 2019, the contents of each of which are incorporated herein by reference in their entireties.

[0033] In some embodiments, a nucleobase editor converts an A to G. In some embodiments, the nucleobase editor comprises an adenosine deaminase. An “adenosine deaminase” is an enzyme involved in purine metabolism. It is needed for the breakdown of adenosine from food and for the turnover of nucleic acids in tissues. Its primary function in humans is the development and maintenance of the immune system. An adenosine deaminase catalyzes hydrolytic deamination of adenosine (forming inosine, which base pairs as G) in the context of DNA. There are no known adenosine deaminases that act on DNA. Instead, known adenosine deaminase enzymes only act on RNA (tRNA or mRNA). Evolved deoxyadenosine deaminase enzymes that accept DNA substrates and deaminate dA to deoxyinosine have been described, e.g., in PCT Application PCT/US2017/045381, filed Aug. 3, 2017, which published as WO 2018/027078, and PCT Application No. PCT/US2019/033848, which published as WO 2019/226953, each of which is herein incorporated by reference by reference.

[0034] Exemplary adenine base editors (ABEs) (or “adenosine base editors”) and cytosine base editors (CBEs) (or “cytosine base editors”) are also described in Rees & Liu, Base editing: precision chemistry on the genome and transcriptome of living cells, Nat. Rev. Genet. 2018; 19(12):770-788; as well as U.S. Patent Publication No. 2018/0073012, published Mar. 15, 2018, which issued as U.S. Pat. No. 10,113,163, on Oct. 30, 2018; U.S. Patent Publication No. 2017/0121693, published May 4, 2017, which issued as U.S. Pat. No. 10,167,457 on Jan. 1, 2019; International Publication No. WO 2017/070633, published Apr. 27, 2017; U.S. Patent Publication No. 2015/0166980, published Jun. 18, 2015; U.S. Pat. No. 9,840,699, issued Dec. 12, 2017; and U.S. Pat. No. 10,077,453, issued Sep. 18, 2018, the contents of each of which are incorporated herein by reference in their entireties.

[0035] In principle, there are 12 possible base-to-base changes that may occur via individual or sequential use of transition (i.e., a purine-to-purine change or pyrimidine-to-pyrimidine change) or transversion (i.e., a purine-to-pyrimidine or pyrimidine-to-purine) editors. These include:

### Transition Base Editors:

[0036] C-to-T base editor (or “CTBE”). This type of editor converts a C:G Watson-Crick nucleobase pair to a T:A Watson-Crick nucleobase pair. Because the corresponding Watson-Crick paired bases are also interchanged as a result of the conversion, this category of base editor may also be referred to as a G-to-A base editor (or “GABE”).

[0037] A-to-G base editor (or “AGBE”). This type of editor converts a A:T Watson-Crick nucleobase pair to a G:C Watson-Crick nucleobase pair. Because the corresponding Watson-Crick paired bases are also interchanged as a result of the conversion, this category of base editor may also be referred to as a T-to-C base editor (or “TCBE”).

### Transversion Base Editors:

[0038] C-to-G base editor (or “CGBE”). This type of editor converts a C:G Watson-Crick nucleobase pair to a G:C Watson-Crick nucleobase pair. Because the corresponding Watson-Crick paired bases are also interchanged as a result of the conversion, this category of base editor may also be referred to as a G-to-C base editor (or “GCBE”).

[0039] G-to-T base editor (or “ACBE”). This type of editor converts a G:C Watson-Crick nucleobase pair to a T:A Watson-Crick nucleobase pair. Because the corresponding Watson-Crick paired bases are also interchanged as a result of the conversion, this category of base editor may also be referred to as a C-to-A base editor (or “CABE”).

[0040] A-to-T base editor (or “TGBE”). This type of editor converts a A:T Watson-Crick nucleobase pair to a T:A Watson-Crick nucleobase pair. Because the corresponding Watson-Crick paired bases are also interchanged as a result of the conversion, this category of base editor may also be referred to as a T-to-A base editor (or “ACBE”).

[0041] A-to-C base editor (or “ACBE”). This type of editor converts a A:T Watson-Crick nucleobase pair to a C:G Watson-Crick nucleobase pair. Because the corresponding Watson-Crick paired bases are also interchanged as a result of the conversion, this category of base editor may also be referred to as a T-to-G base editor (or “TGBE”).

[0042] The term “base editors (BEs)”, as used herein, refers to the Cas-fusion proteins described herein. In some embodiments, the fusion protein comprises a nuclease-inactive Cas9 (dCas9) fused to an DNA nucleobase modification domain (e.g., adenine deaminase) which binds a nucleic acid in a guide RNA-programmed manner via the formation of an R-loop but does not cleave the nucleic acid. For example, the dCas9 domain of the fusion protein may include a D10A and a H840A mutation (which renders Cas9 capable of cleaving only one strand of a nucleic acid duplex) as described in PCT/US2016/058344 (filed on Oct. 22, 2016 and published as WO 2017/070632 on Apr. 27, 2017), which is incorporated herein by reference in its entirety. The DNA cleavage domain of S. pyogenes Cas9 includes two subdomains, the HNH nuclease subdomain and the RuvC1 subdomain. The HNH subdomain cleaves the strand complementary to the gRNA (the “targeted strand,” or the strand at which editing or oxidation occurs), whereas the RuvC1 subdomain cleaves the non-complementary strand containing the PAM sequence (the “non-targeted strand”, or the strand at which editing or oxidation does not occur). The RuvC1 mutant D10A generates a nick on the targeted strand, while the HNH mutant H840A generates a nick on the non-targeted strand (see Jinek et al., Science. 337:816-821(2012); Qi et al., Cell. 28; 152(5):1173-83 (2013))

[0043] In some embodiments, the fusion protein comprises a Cas9 nickase fused to an DNA nucleobase modification domain (e.g., adenine deaminase). The term “base editors” encompasses the base editors described herein as well as any base editor known or described in the art at the time of this filing or developed in the future. Reference is made to Rees & Liu, Base editing: precision chemistry on the genome and transcriptome of living cells, Nat Rev Genet. 2018; 19(12):770-788; as well as U.S. Patent Publication No. 2018/0073012, published Mar. 15, 2018, which issued as U.S. Pat. No. 10,113,163; on Oct. 30, 2018; U.S. Patent Publication No. 2017/0121693, published May 4, 2017, which issued as U.S. Pat. No. 10,167,457 on Jan. 1, 2019, as U.S. Pat. No. 10,167,457; International Publication No. WO 2017/070633, published Apr. 27, 2017; U.S. Patent Publication No. 2015/0166980, published Jun. 18, 2015; U.S. Pat. No. 9,840,699, issued Dec. 12, 2017; and U.S. Pat. No. 10,077,453, issued Sep. 18, 2018, the contents of each of which are incorporated herein by reference in their entireties.

[0044] The term “Cas9” or “Cas9 nuclease” or “Cas9 domain” refers to a CRISPR associated protein 9, or variant thereof, and embraces any naturally occurring Cas9 from any organism, any naturally-occurring Cas9, any Cas9 homolog, ortholog, or paralog from any organism, and any variant of a Cas9, naturally-occurring or engineered. More broadly, a Cas9 protein, domain, or domain is a type of “nucleic acid programmable DNA binding protein (napDNAbp)”. The term Cas9 is not meant to be limiting and may be referred to as a “Cas9 or variant thereof.” Exemplary Cas9 proteins are described herein and also described in the art. The present disclosure is unlimited with regard to the particular Cas9 that is employed in the base editors of the invention.

[0045] In some embodiments, proteins comprising Cas9 or fragments thereof are referred to as “Cas9 variants.” A Cas9 variant shares homology to Cas9, or a fragment thereof. Cas9 variants include functional fragments of Cas9. For example, a Cas9 variant is at least about 70% identical, at least about 80% identical, at least about 90% identical, at least about 95% identical, at least about 96% identical, at least about 97% identical, at least about 98% identical, at least about 99% identical, at least about 99.5% identical, or at least about 99.9% identical to wild type Cas9. In some embodiments, the Cas9 variant may have 1, 2, 3, 4, 5, 6, 7, 8, 9, 10, 11, 12, 13, 14, 15, 16, 17, 18, 19, 20, 21, 22, 21, 24, 25, 26, 27, 28, 29, 30, 31, 32, 33, 34, 35, 36, 37, 38, 39, 40, 41, 42, 43, 44, 45, 46, 47, 48, 49, 50 or more amino acid changes compared to a wild type Cas9. In some embodiments, the Cas9 variant comprises a fragment of Cas9 (e.g., a gRNA binding domain or a DNA-cleavage domain), such that the fragment is at least about 70% identical, at least about 80% identical, at least about 90% identical, at least about 95% identical, at least about 96% identical, at least about 97% identical, at least about 98% identical, at least about 99% identical, at least about 99.5% identical, or at least about 99.9% identical to the corresponding fragment of wild type Cas9. In some embodiments, the fragment is at least 30%, at least 35%, at least 40%, at least 45%, at least 50%, at least 55%, at least 60%, at least 65%, at least 70%, at least 75%, at least 80%, at least 85%, at least 90%, at least 95% identical, at least 96%, at least 97%, at least 98%, at least 99%, or at least 99.5% of the amino acid length of a corresponding wild type Cas9.

[0046] As used herein, the term “dCas9” refers to a nuclease-inactive Cas9 or nuclease-dead Cas9, or a functional fragment or variant thereof, and embraces any naturally occurring dCas9 from any organism, any naturally-occurring dCas9 equivalent or functional fragment thereof, any dCas9 homolog, ortholog, or paralog from any organism, and any mutant or variant of a dCas9, naturally-occurring or engineered. The term dCas9 is not meant to be particularly limiting and may be referred to as a “dCas9 or equivalent.” Exemplary dCas9 proteins and method for making dCas9 proteins are further described herein and/or are described in the art and are incorporated herein by reference.

[0047] As used herein, the term “nCas9” or “Cas9 nickase” refers to a Cas9 or a functional fragment or variant thereof, which cleaves or nicks only one of the strands of a target cut site thereby introducing a nick in a double strand DNA molecule rather than creating a double strand break. This can be achieved by introducing appropriate mutations in a wild-type Cas9 which inactivates one of the two endonuclease activities of the Cas9. Any suitable mutation which inactivates one Cas9 endonuclease activity but leaves the other intact is contemplated, such as one of D10A or H840A mutations in the wild-type Cas9 amino acid sequence (e.g., SEQ ID NO: 1) may be used to form the nCas9.

SpCas9, Streptococcus pyogenes M1, SwissProt Accession
No. Q99ZW2, Wild type
(SEQ ID NO: 1)
MDKKYSIGLDIGTNSVGWAVITDEYKVPSKKFKVLGNTDRHSIKKNLIGALLF
DSGETAEATRLKRTARRRYTRRKNRICYLQEIFSNEMAKVDDSFFHRLEESFLVEEDKK
HERHPIFGNIVDEVAYHEKYPTIYHLRKKLVDSTDKADLRLIYLALAHMIKFRGHFLIEG
DLNPDNSDVDKLFIQLVQTYNQLFEENPINASGVDAKAILSARLSKSRRLENLIAQLPGE
KKNGLFGNLIALSLGLTPNFKSNFDLAEDAKLQLSKDTYDDDLDNLLAQIGDQYADLFL
AAKNLSDAILLSDILRVNTEITKAPLSASMIKRYDEHHQDLTLLKALVRQQLPEKYKEIFF
DQSKNGYAGYIDGGASQEEFYKFIKPILEKMDGTEELLVKLNREDLLRKQRTFDNGSIPH
QIHLGELHAILRRQEDFYPFLKDNREKIEKILTFRIPYYVGPLARGNSRFAWMTRKSEETI
TPWNFEEVVDKGASAQSFIERMTNFDKNLPNEKVLPKHSLLYEYFTVYNELTKVKYVTE
GMRKPAFLSGEQKKAIVDLLFKTNRKVTVKQLKEDYFKKIECFDSVEISGVEDRFNASL
GTYHDLLKIIKDKDFLDNEENEDILEDIVLTLTLFEDREMIEERLKTYAHLEDDKVMKQL
KRRRYTGWGRLSRKLINGIRDKQSGKTILDFLKSDGFANRNFMQLIHDDSLTFKEDIQKA
QVSGQGDSLHEHIANLAGSPAIKKGILQTVKVVDELVKVMGRHKPENIVIEMARENQTT
QKGQKNSRERMKRIEEGIKELGSQILKEHPVENTQLQNEKLYLYYLQNGRDMYVDQEL
DINRLSDYDVDHIVPQSFLKDDSIDNKVLTRSDKNRGKSDNVPSEEVVKKMKNYWRQL
LNAKLITQRKFDNLTKAERGGLSELDKAGFIKRQLVETRQITKHVAQILDSRMNTKYDE
NDKLIREVKVITLKSKLVSDFRKDFQFYKVREINNYHHAHDAYLNAVVGTALIKKYPKL
ESEFVYGDYKVYDVRKMIAKSEQEIGKATAKYFFYSNIMNFFKTEITLANGEIRKRPLIET
NGETGEIVWDKGRDFATVRKVLSMPQVNIVKKTEVQTGGFSKESILPKRNSDKLIARKK
DWDPKKYGGFDSPTVAYSVLVVAKVEKGKSKKLKSVKELLGITIMERSSFEKNPIDFLE
AKGYKEVKKDLIIKLPKYSLFELENGRKRMLASAGELQKGNELALPSKYVNFLYLASHY
EKLKGSPEDNEQKQLFVEQHKHYLDEIIEQISEFSKRVILADANLDKVLSAYNKHRDKPI
REQAENIIHLFTLTNLGAPAAFKYFDTTIDRKRYTSTKEVLDATLIHQSITGLYETRIDLSQ
LGGD.

[0048] The skilled artisan will understand the above example is for illustration only and is not mean to limit the disclosure in any way. As described above, any Cas9 variant may be inactivated to yield ‘dead’ or ‘nickase’ variants (e.g., dCfp1, nCfp1, etc.).

[0049] “CRISPR” is a family of DNA sequences (i.e., CRISPR clusters) in bacteria and archaea that represent snippets of prior infections by a virus that have invaded the prokaryote. The snippets of DNA are used by the prokaryotic cell to detect and destroy DNA from subsequent attacks by similar viruses and effectively constitute, along with an array of CRISPR-associated proteins (including Cas9 and homologs thereof) and CRISPR-associated RNA, a prokaryotic immune defense system. In nature, CRISPR clusters are transcribed and processed into CRISPR RNA (crRNA). In certain types of CRISPR systems (e.g., type II CRISPR systems), correct processing of pre-crRNA requires a trans-encoded small RNA (tracrRNA), endogenous ribonuclease 3 (rnc), and a Cas9 protein. The tracrRNA serves as a guide for ribonuclease 3-aided processing of pre-crRNA. Subsequently, Cas9/crRNA/tracrRNA endonucleolytically cleaves linear or circular nucleic acid target complementary to the RNA. Specifically, the target strand not complementary to crRNA is first cut endonucleolytically, then trimmed 3′-5′ exonucleolytically. In nature, DNA-binding and cleavage typically requires protein and both RNAs. However, single guide RNAs (“sgRNA”, or simply “gRNA”) can be engineered so as to incorporate embodiments of both the crRNA and tracrRNA into a single RNA species—the guide RNA. See, e.g., Jinek M., et al., Science 337:816-821(2012), the entire contents of which is herein incorporated by reference. Cas9 recognizes a short motif in the CRISPR repeat sequences (the PAM or protospacer adjacent motif) to help distinguish self versus non-self. CRISPR biology, as well as Cas9 nuclease sequences and structures are well known to those of skill in the art (see, e.g., “Complete genome sequence of an M1 strain of Streptococcus pyogenes.” Ferretti J. J., et al., Proc. Natd. Acad. Sci. U.S.A. 98:4658-4663(2001); “CRISPR RNA maturation by trans-encoded small RNA and host factor RNase III.” Deltcheva E., et al., Nature 471:602-607 (2011); and “A programmable dual-RNA-guided DNA endonuclease in adaptive bacterial immunity.” Jinek M., et al., Science 337:816-821(2012), the entire contents of each of which are incorporated herein by reference). Cas9 orthologs have been described in various species, including, but not limited to, S. pyogenes, S. thermophiles, C. ulcerans, S. diphtheria, S. syrphidicola, P. intermedia, S. taiwanense, S. iniae, B. baltica, P. torquis, S. thermophilus, L. innocua, C. jejuni, and N.. meningitidis. Additional suitable Cas9 nucleases and sequences will be apparent to those of skill in the art based on this disclosure, and such Cas9 nucleases and sequences include Cas9 sequences from the organisms and loci disclosed in Chylinski, Rhun, and Charpentier, “The tracrRNA and Cas9 families of type II CRISPR-Cas immunity systems” (2013) RNA Biology 10:5, 726-737; the entire contents of which are incorporated herein by reference.

[0050] The term “effective amount,” as used herein, refers to an amount of a biologically active agent that is sufficient to elicit a desired biological response. For example, in some embodiments, an effective amount of a base editor may refer to the amount of the base editor that is sufficient to edit a target site nucleotide sequence, e.g., a genome. In some embodiments, an effective amount of a base editor provided herein, e.g., of a fusion protein comprising a nuclease-inactive Cas9 domain and a nucleobase modification domain (e.g., an cytidine and/or adenosine deaminases) may refer to the amount of the fusion protein that is sufficient to induce editing of a target site specifically bound and edited by the fusion protein. In some embodiments, an effective amount of a base editor provided herein may refer to the amount of the fusion protein sufficient to induce editing having the following characteristics: >50% product purity, <5% indels, and an editing window of 2-8 nucleotides. As will be appreciated by the skilled artisan, the effective amount of an agent, e.g., a fusion protein, a nuclease, a deaminase, a hybrid protein, a protein dimer, a complex of a protein (or protein dimer) and a polynucleotide, or a polynucleotide, may vary depending on various factors as, for example, on the desired biological response, e.g., on the specific allele, genome, or target site to be edited, on the target cell or tissue (i.e., the cell or tissue to be edited), and on the agent being used.

[0051] The term “fusion protein” as used herein refers to a hybrid polypeptide which comprises protein domains from at least two different proteins. One protein may be located at the amino-terminal (N-terminal) portion of the fusion protein or at the carboxy-terminal (C-terminal) protein thus forming an “amino-terminal fusion protein” or a “carboxy-terminal fusion protein,” respectively. A protein may comprise different domains, for example, a nucleic acid binding domain (e.g., the gRNA binding domain of Cas9 that directs the binding of the protein to a target site) and a nucleic acid cleavage domain or a catalytic domain of a nucleic-acid editing protein. Any of the proteins provided herein may be produced by any method known in the art. For example, the proteins provided herein may be produced via recombinant protein expression and purification, which is especially suited for fusion proteins comprising a peptide linker. Methods for recombinant protein expression and purification are well known, and include those described by Green and Sambrook, Molecular Cloning: A Laboratory Manual (4^{th} ed., Cold Spring Harbor Laboratory Press, Cold Spring Harbor, N.Y. (2012)), the entire contents of which are incorporated herein by reference.

[0052] The term “linker,” as used herein, refers to a chemical group or a molecule linking two molecules or domains, e.g., nCas9 and an cytidine and/or adenosine deaminase. In some embodiments, a linker joins a dCas9 and modification domain (e.g., an cytidine and/or adenosine deaminase). Typically, the linker is positioned between, or flanked by, two groups, molecules, or other domains and connected to each one via a covalent bond, thus connecting the two. In some embodiments, the linker is an amino acid or a plurality of amino acids (e.g., a peptide or protein). In some embodiments, the linker is an organic molecule, group, polymer, or chemical domain. Chemical domains include, but are not limited to, disulfide, hydrazone, thiol and azo domains. In some embodiments, the linker is 5-100 amino acids in length, for example, 5, 6, 7, 8, 9, 10, 11, 12, 13, 14, 15, 16, 17, 18, 19, 20, 21, 22, 23, 24, 25, 26, 27, 28, 29, 30, 30-35, 35-40, 40-45, 45-50, 50-60, 60-70, 70-80, 80-90, 90-100, 100-150, or 150-200 amino acids in length.

[0053] Longer or shorter linkers are also contemplated.

[0054] The term “mutation,” as used herein, refers to a substitution of a residue within a sequence, e.g., a nucleic acid or amino acid sequence, with another residue; a deletion or insertion of one or more residues within a sequence; or a substitution of a residue within a sequence of a genome in a subject to be corrected. Mutations are typically described herein by identifying the original residue followed by the position of the residue within the sequence and by the identity of the newly substituted residue. Various methods for making the amino acid substitutions (mutations) provided herein are well known in the art, and are provided by, for example, Green and Sambrook, Molecular Cloning: A Laboratory Manual (4^{th} ed., Cold Spring Harbor Laboratory Press, Cold Spring Harbor, N.Y. (2012)). Mutations can include a variety of categories, such as single base polymorphisms, microduplication regions, indel, and inversions, and is not meant to be limiting in any way. Mutations can include “loss-of-function” mutations which is the normal result of a mutation that reduces or abolishes a protein activity. Most loss-of-function mutations are recessive, because in a heterozygote the second chromosome copy carries an unmutated version of the gene coding for a fully functional protein whose presence compensates for the effect of the mutation. There are some exceptions where a loss-of-function mutation is dominant, one example being haploinsufficiency, where the organism is unable to tolerate the approximately 50% reduction in protein activity suffered by the heterozygote. This is the explanation for a few genetic diseases in humans, including Marfan syndrome which results from a mutation in the gene for the connective tissue protein called fibrillin. Mutations also embrace “gain-of-function” mutations, which is one which confers an abnormal activity on a protein or cell that is otherwise not present in a normal condition. Many gain-of-function mutations are in regulatory sequences rather than in coding regions, and can therefore have a number of consequences. For example, a mutation might lead to one or more genes being expressed in the wrong tissues, these tissues gaining functions that they normally lack. Alternatively the mutation could lead to overexpression of one or more genes involved in control of the cell cycle, thus leading to uncontrolled cell division and hence to cancer. Because of their nature, gain-of-function mutations are usually dominant.

[0055] The terms “non-naturally occurring” or “engineered” are used interchangeably and indicate the involvement of the hand of man. The terms, when referring to nucleic acid molecules or polypeptides (e.g., Cas9 or cytidine and/or adenosine deaminases) mean that the nucleic acid molecule or the polypeptide is at least substantially free from at least one other component with which they are naturally associated in nature and/or as found in nature (e.g., an amino acid sequence not found in nature). The terms, when referring to edited endogenous tRNA molecules refer to endogenous tRNAs comprising a nonsense suppressor anticodon.

[0056] The term “nucleic acid,” as used herein, refers to RNA as well as single and/or double-stranded DNA. Nucleic acids may be naturally occurring, for example, in the context of a genome, a transcript, an mRNA, tRNA, rRNA, siRNA, snRNA, a plasmid, cosmid, chromosome, chromatid, or other naturally occurring nucleic acid molecule. On the other hand, a nucleic acid molecule may be a non-naturally occurring molecule, e.g., a recombinant DNA or RNA, an artificial chromosome, an engineered genome, or fragment thereof, or a synthetic DNA, RNA, DNA/RNA hybrid, or including non-naturally occurring nucleotides or nucleosides. Furthermore, the terms “nucleic acid,” “DNA,” “RNA,” and/or similar terms include nucleic acid analogs, e.g., analogs having other than a phosphodiester backbone. Nucleic acids can be purified from natural sources, produced using recombinant expression systems and optionally purified, chemically synthesized, etc. Where appropriate, e.g., in the case of chemically synthesized molecules, nucleic acids can comprise nucleoside analogs such as analogs having chemically modified bases or sugars, and backbone modifications. A nucleic acid sequence is presented in the 5′ to 3′ direction unless otherwise indicated. In some embodiments, a nucleic acid is or comprises natural nucleosides (e.g. adenosine, thymidine, guanosine, cytidine, uridine, deoxyadenosine, deoxythymidine, deoxyguanosine, and deoxycytidine); nucleoside analogs (e.g., 2-aminoadenosine, 2-thiothymidine, inosine, pyrrolo-pyrimidine, 3-methyl adenosine, 5-methylcytidine, 2-aminoadenosine, C5-bromouridine, C5-fluorouridine, C5-iodouridine, C5-propynyl-uridine, C5-propynyl-cytidine, C5-methylcytidine, 2-aminoadenosine, 7-deazaadenosine, 7-deazaguanosine, 8-oxoadenine, 8-oxoguanosine, 0(6)-methylguanine, and 2-thiocytidine); chemically modified bases; biologically modified bases (e.g., methylated bases); intercalated bases; modified sugars (e.g., 2′-fluororibose, ribose, 2′-deoxyribose, arabinose, and hexose); and/or modified phosphate groups (e.g., phosphorothioates and 5′-N-phosphoramidite linkages).

[0057] The term “nucleic acid programmable DNA binding protein (napDNAbp)” refers to any protein that may associate (e.g., form a complex) with one or more nucleic acid molecules (i.e., which may broadly be referred to as a “napDNAbp-programming nucleic acid molecule” and includes, for example, guide RNA in the case of Cas systems) which direct or otherwise program the protein to localize to a specific target nucleotide sequence (e.g., a gene locus of a genome) that is complementary to the one or more nucleic acid molecules (or a portion or region thereof) associated with the protein, thereby causing the protein to bind to the nucleotide sequence at the specific target site. This term napDNAbp embraces CRISPR Cas9 proteins, as well as Cas9 equivalents, homologs, orthologs, or paralogs, whether naturally occurring or non-naturally occurring (e.g., engineered or modified), and may include a Cas9 equivalent from any type of CRISPR system (e.g., type II, V, VI), including Cpf1 (a type-V CRISPR-Cas systems), C2c1 (a type V CRISPR-Cas system), C2c2 (a type VI CRISPR-Cas system), C2c3 (a type V CRISPR-Cas system), dCas9, GeoCas9, CjCas9, Cas12a, Cas12b, Cas12c, Cas12d, Cas12g, Cas12h, Cas12i, Cas13d, Cas14, Argonaute, and nCas9. Further Cas-equivalents are described in Makarova et al., “C2c2 is a single-component programmable RNA-guided RNA-targeting CRISPR effector,” Science 2016; 353 (6299), the contents of which are incorporated herein by reference. However, the nucleic acid programmable DNA binding protein (napDNAbp) that may be used in connection with this invention are not limited to CRISPR-Cas systems. The invention embraces any such programmable protein, such as the Argonaute protein from Natronobacterium gregoryi (NgAgo) which may also be used for DNA-guided genome editing. NgAgo-guide DNA system does not require a PAM sequence or guide RNA molecules, which means genome editing can be performed simply by the expression of generic NgAgo protein and introduction of synthetic oligonucleotides on any genomic sequence. See Gao et al., DNA-guided genome editing using the Natronobacterium gregoryi Argonaute. Nature Biotechnology 2016; 34(7):768-73, which is incorporated herein by reference.

[0058] In some embodiments, the napDNAbp is a RNA-programmable nuclease, when in a complex with an RNA, may be referred to as a nuclease:RNA complex. Typically, the bound RNA(s) is referred to as a guide RNA (gRNA). gRNAs can exist as a complex of two or more RNAs, or as a single RNA molecule. gRNAs that exist as a single RNA molecule may be referred to as single-guide RNAs (sgRNAs), though “gRNA” is used interchangeably to refer to guide RNAs that exist as either single molecules or as a complex of two or more molecules. Typically, gRNAs that exist as single RNA species comprise two domains: (1) a domain that shares homology to a target nucleic acid (e.g., and directs binding of a Cas9 (or equivalent) complex to the target); and (2) a domain that binds a Cas9 protein. In some embodiments, domain (2) corresponds to a sequence known as a tracrRNA, and comprises a stem-loop structure. For example, in some embodiments, domain (2) is homologous to a tracrRNA as depicted in FIG. 1E of Jinek et al., Science 337:816-821(2012), the entire contents of which is incorporated herein by reference. Other examples of gRNAs (e.g., those including domain 2) can be found in U.S. Pat. No. 9,340,799, entitled “mRNA-Sensing Switchable gRNAs,” and International Patent Application No. PCT/US2014/054247, filed Sep. 6, 2013, published as WO 2015/035136 and entitled “Delivery System For Functional Nucleases,” the entire contents of each are herein incorporated by reference. In some embodiments, a gRNA comprises two or more of domains (1) and (2), and may be referred to as an “extended gRNA.” For example, an extended gRNA will, e.g., bind two or more Cas9 proteins and bind a target nucleic acid at two or more distinct regions, as described herein. The gRNA comprises a nucleotide sequence that complements a target site, which mediates binding of the nuclease/RNA complex to said target site, providing the sequence specificity of the nuclease:RNA complex. In some embodiments, the RNA-programmable nuclease is the (CRISPR-associated system) Cas9 endonuclease, for example Cas9 (Csnl) from Streptococcus pyogenes (see, e.g., “Complete genome sequence of an M1 strain of Streptococcus pyogenes.” Ferretti J. J. et al., Proc. Natl. Acad. Sci. U.S.A. 98:4658-4663(2001); “CRISPR RNA maturation by trans-encoded small RNA and host factor RNase III.” Deltcheva E. et al., Nature 471:602-607(2011); and “A programmable dual-RNA-guided DNA endonuclease in adaptive bacterial immunity.” Jinek M. et al., Science 337:816-821(2012), the entire contents of each of which are incorporated herein by reference.

[0059] The napDNAbp nucleases (e.g., Cas9) use RNA:DNA hybridization to target DNA cleavage sites, these proteins are able to be targeted, in principle, to any sequence specified by the guide RNA. Methods of using napDNAbp nucleases, such as Cas9, for site-specific cleavage (e.g., to modify a genome) are known in the art (see e.g., Cong, L. et al. Multiplex genome engineering using CRISPR/Cas systems. Science 339, 819-823 (2013); Mali, P. et al. RNA-guided human genome engineering via Cas9. Science 339, 823-826 (2013); Hwang, W. Y. et al. Efficient genome editing in zebrafish using a CRISPR-Cas system. Nature Biotechnology 31, 227-229 (2013); Jinek, M. et al. RNA-programmed genome editing in human cells. eLife 2, e00471 (2013); Dicarlo, J. E. et al., Genome engineering in Saccharomyces cerevisiae using CRISPR-Cas systems. Nucleic Acid Res. (2013); Jiang, W. et al. RNA-guided editing of bacterial genomes using CRISPR-Cas systems. Nature Biotechnology 31, 233-239 (2013); the entire contents of each of which are incorporated herein by reference).

[0060] The term “napDNAbp-programming nucleic acid molecule” or equivalently “guide sequence” refers the one or more nucleic acid molecules which associate with and direct or otherwise program a napDNAbp protein to localize to a specific target nucleotide sequence (e.g., a gene locus of a genome) that is complementary to the one or more nucleic acid molecules (or a portion or region thereof) associated with the protein, thereby causing the napDNAbp protein to bind to the nucleotide sequence at the specific target site. A non-limiting example is a guide RNA of a Cas protein of a CRISPR-Cas genome editing system.

[0061] A nuclear localization signal or sequence (NLS) is an amino acid sequence that tags, designates, or otherwise marks a protein for import into the cell nucleus by nuclear transport. Typically, this signal consists of one or more short sequences of positively charged lysines or arginines exposed on the protein surface. Different nuclear localized proteins may share the same NLS. An NLS has the opposite function of a nuclear export signal (NES), which targets proteins out of the nucleus. Thus, a single nuclear localization signal can direct the entity with which it is associated to the nucleus of a cell. Such sequences can be of any size and composition, for example more than 25, 25, 15, 12, 10, 8, 7, 6, 5 or 4 amino acids, but will preferably comprise at least a four to eight amino acid sequence known to function as a nuclear localization signal (NLS).

[0062] The term, as used herein, “nucleobase modification domain” or “modification domain” embraces any protein, enzyme, or polypeptide (or functional fragment thereof) which is capable of modifying a DNA or RNA molecule. Nucleobase modification domains may be naturally occurring, or may be engineered. For example, a nucleobase modification domain can include one or more DNA repair enzymes, for example, and an enzyme or protein involved in base excision repair (BER), nucleotide excision repair (NER), homology-dependent recombinational repair (HR), non-homologous end-joining repair (NHEJ), microhomology end-joining repair (MMEJ), mismatch repair (MMR), direct reversal repair, or other known DNA repair pathway. A nucleobase modification domain can have one or more types of enzymatic activities, including, but not limited to, endonuclease activity, polymerase activity, ligase activity, replication activity, and proofreading activity. Nucleobase modification domains can also include DNA or RNA-modifying enzymes and/or mutagenic enzymes, such as DNA oxidizing enzymes (i.e., cytidine and/or adenosine deaminases), which covalently modify nucleobases leading in some cases to mutagenic corrections by way of normal cellular DNA repair and replication processes. Exemplary nucleobase modification domains include, but are not limited to, an cytidine and/or adenosine deaminase, a nuclease, a nickase, a recombinase, a methyltransferase, a methylase, an acetylase, an acetyltransferase, a transcriptional activator, or a transcriptional repressor domain. In some embodiments the nucleobase modification domain is an cytidine and/or adenosine deaminase (e.g., AlkBH1).

[0063] As used herein, the terms “oligonucleotide” and “polynucleotide” can be used interchangeably to refer to a polymer of nucleotides (e.g., a string of at least three nucleotides).

[0064] The term “promoter” is art-recognized and refers to a nucleic acid molecule with a sequence recognized by the cellular transcription machinery and able to initiate transcription of a downstream gene. A promoter can be constitutively active, meaning that the promoter is always active in a given cellular context, or conditionally active, meaning that the promoter is only active in the presence of a specific condition. For example, a conditional promoter may only be active in the presence of a specific protein that connects a protein associated with a regulatory element in the promoter to the basic transcriptional machinery, or only in the absence of an inhibitory molecule. A subclass of conditionally active promoters are inducible promoters that require the presence of a small molecule “inducer” for activity. Examples of inducible promoters include, but are not limited to, arabinose-inducible promoters, Tet-on promoters, and tamoxifen-inducible promoters. A variety of constitutive, conditional, and inducible promoters are well known to the skilled artisan, and the skilled artisan will be able to ascertain a variety of such promoters useful in carrying out the instant invention, which is not limited in this respect. In various embodiments, the specification provides vectors with appropriate promoters for driving expression of the nucleic acid sequences encoding the base editor fusion proteins (or one more individual components thereof).

[0065] The terms “protein,” “peptide,” and “polypeptide” are used interchangeably herein, and refer to a polymer of amino acid residues linked together by peptide (amide) bonds. The terms refer to a protein, peptide, or polypeptide of any size, structure, or function. Typically, a protein, peptide, or polypeptide will be at least three amino acids long. A protein, peptide, or polypeptide may refer to an individual protein or a collection of proteins. One or more of the amino acids in a protein, peptide, or polypeptide may be modified, for example, by the addition of a chemical entity such as a carbohydrate group, a hydroxyl group, a phosphate group, a farnesyl group, an isofarnesyl group, a fatty acid group, a linker for conjugation, functionalization, or other modification, etc. A protein, peptide, or polypeptide may also be a single molecule or may be a multi-molecular complex. A protein, peptide, or polypeptide may be just a fragment of a naturally occurring protein or peptide. A protein, peptide, or polypeptide may be naturally occurring, engineered, or synthetic, or any combination thereof. The term “fusion protein” as used herein refers to a hybrid polypeptide which comprises protein domains from at least two different proteins. One protein may be located at the amino-terminal (N-terminal) portion of the fusion protein or at the carboxy-terminal (C-terminal) protein thus forming an “amino-terminal fusion protein” or a “carboxy-terminal fusion protein,” respectively. A protein may comprise different domains, for example, a nucleic acid binding domain (e.g., the gRNA binding domain of Cas9 that directs the binding of the protein to a target site) and a nucleic acid cleavage domain or a catalytic domain of a recombinase. In some embodiments, a protein comprises a proteinaceous part, e.g., an amino acid sequence constituting a nucleic acid binding domain, and an organic compound, e.g., a compound that can act as a nucleic acid cleavage agent. In some embodiments, a protein is in a complex with, or is in association with, a nucleic acid, e.g., RNA. Any of the proteins provided herein may be produced by any method known in the art. For example, the proteins provided herein may be produced via recombinant protein expression and purification, which is especially suited for fusion proteins comprising a peptide linker. Methods for recombinant protein expression and purification are well known, and include those described by Green and Sambrook, Molecular Cloning: A Laboratory Manual (4th ed., Cold Spring Harbor Laboratory Press, Cold Spring Harbor, N.Y. (2012)), the entire contents of which are incorporated herein by reference.

[0066] The term “recombinant” as used herein in the context of proteins or nucleic acids refers to proteins or nucleic acids that do not occur in nature, but are the product of human engineering. For example, in some embodiments, a recombinant protein or nucleic acid molecule comprises an amino acid or nucleotide sequence that comprises at least one, at least two, at least three, at least four, at least five, at least six, or at least seven mutations as compared to any naturally occurring sequence.

[0067] The term “subject,” as used herein, refers to an individual organism, for example, an individual mammal. In some embodiments, the subject is a human. In some embodiments, the subject is a non-human mammal. In some embodiments, the subject is a non-human primate. In some embodiments, the subject is a rodent. In some embodiments, the subject is a sheep, a goat, a cattle, a cat, or a dog. In some embodiments, the subject is a vertebrate, an amphibian, a reptile, a fish, an insect, a fly, or a nematode. In some embodiments, the subject is a research animal. In some embodiments, the subject is an experimental organism. In some embodiments, the subject is a plant. In some embodiments, the subject is genetically engineered, e.g., a genetically engineered non-human subject. The subject may be of either sex and at any stage of development.

[0068] The term “target site” refers to a sequence within a nucleic acid molecule that is edited by a base editor (e.g., a dCas9-cytidine and/or adenosine deaminase fusion protein provided herein). The target site further refers to the sequence within a nucleic acid molecule to which a complex of the base editor and gRNA binds.

[0069] The term “vector,” as used herein, may refer to a nucleic acid that has been modified to encode the base editor and/or gRNA. Exemplary suitable vectors include viral vectors, such as retroviral vectors or bacteriophages and filamentous phage, and conjugative plasmids.

[0070] The term “viral particle,” as used herein, refers to a viral genome, for example, a DNA or RNA genome, that is associated with a coat of a viral protein or proteins, and, in some cases, with an envelope of lipids. For example, a phage particle comprises a phage genome packaged into a protein encoded by the wild type phage genome.

[0071] The term “viral vector,” as used herein, refers to a nucleic acid comprising a viral genome that, when introduced into a suitable host cell, can be replicated and packaged into viral particles able to transfer the viral genome into another host cell. The term “viral vector” extends to vectors comprising truncated or partial viral genomes. For example, in some embodiments, a viral vector is provided that lacks a gene encoding a protein essential for the generation of infectious viral particles. In suitable host cells, for example, host cells comprising the lacking gene under the control of a conditional promoter, however, such truncated viral vectors can replicate and generate viral particles able to transfer the truncated viral genome into another host cell. In some embodiments, the viral vector is an adeno-associated virus (AAV) vector.

[0072] The terms “treatment,” “treat,” and “treating,” refer to a clinical intervention aimed to reverse, alleviate, delay the onset of, or inhibit the progress of a disease, disorder, or condition, or one or more symptoms thereof, as described herein. As used herein, the terms “treatment,” “treat,” and “treating” refer to a clinical intervention aimed to reverse, alleviate, delay the onset of, or inhibit the progress of a disease, disorder, or condition, or one or more symptoms thereof, as described herein. In some embodiments, treatment may be administered after one or more symptoms have developed and/or after a disease has been diagnosed. In other embodiments, treatment may be administered in the absence of symptoms, e.g., to prevent or delay onset of a symptom or inhibit onset or progression of a disease. For example, treatment may be administered to a susceptible individual prior to the onset of symptoms (e.g., in light of a history of symptoms and/or in light of genetic or other susceptibility factors). Treatment may also be continued after symptoms have resolved, for example, to prevent or delay their prevention or recurrence.

[0073] As used herein, the term “variant” refers to a protein having characteristics that deviate from what occurs in nature, e.g., a “variant” is at least about 70% identical, at least about 80% identical, at least about 85% identical, at least about 90% identical, at least about 95% identical, at least about 96% identical, at least about 97% identical, at least about 98% identical, at least about 99% identical, at least about 99.5% identical, or at least about 99.9% identical to the wild type protein. For instance, a variant nucleobase modification domain is a nucleobase modification domain comprising one or more changes in amino acid residues of an cytidine and/or adenosine deaminase, as compared to the wild type amino acid sequences thereof. These changes include chemical modifications, including substitutions of different amino acid residues, as well as truncations. This term embraces functional fragments of the wild type amino acid sequence.

[0074] As used herein, the term “wild type” is a term of the art understood by skilled persons and means the typical form of an organism, strain, gene or characteristic as it occurs in nature as distinguished from mutant or variant forms.

[0075] As used herein, the term “non-cognate amino acid” refers to an amino acid that pairs with a tRNA molecule that does not comprise an anticodon sequence encoding said amino acid.

[0076] As used herein, the term “nonsense mutation” refers to a mutation in which a sense codon that corresponds to one of the twenty amino acids specified by the genetic code is changed to a chain-terminating codon (e.g., an opal stop codon, an amber stop codon, or a ochre stop codon).

[0077] As used herein the term “nonsense suppressor anticodon sequence” refers to an anticodon sequence that is complementary to an opal stop codon (e.g., 5′-UCA-3′), an amber codon (e.g., 5′-CUA-3′), or an ochre stop codon (e.g., 5′-UUA-3′).

[0078] As used herein, the term “premature termination stop codon” or “PTC” refers to a nonsense mutation in a mRNA sequence, wherein the stop codon occurs earlier in the sequence, relative to the non-mutated mRNA sequence, and thus impedes translation of the full-length protein encoded by the mRNA sequence. Premature termination codon may be an ochre stop codon comprising a 5′-UAA-3′ codon sequence, an opal stop codon comprising a 5′-UGA-3′ codon sequence, or an amber stop codon comprising a 5′-UAG-3′ codon sequence.

[0079] As used herein, the term “redundant and DNA sequence” refers to a DNA sequence encoding a tRNA gene that has codon degeneracy. Codon degeneracy means that there is more than one codon, and hence anticodon, that specifies a single amino acid (see Table 1)

[0080] As used herein, the term “suppressor tRNA” refers to a tRNA (defined elsewhere herein) charged with an amino acid comprising a mutation in the anticodon that allows it to recognize a premature stop codon (defined elsewhere herein as either an amber, ochre, or opal stop codon) on an mRNA and to and insert an amino acid into the amino acid sequence encoded by the mRNA, thus preventing truncation of the amino acid sequence.

[0081] As used herein the terms “tRNA” or “endogenous tRNA” or “unedited tRNA” collectively refer to a transfer RNA as found in nature. tRNA is an art recognized term that refers to a molecule composed of RNA that serves as the physical link between mRNA and the amino acid sequence of proteins. The tRNA structure consists of the following: (i) a 5′-terminal phosphate group, (ii) an acceptor stem made by the base pairing of the 5′-terminal new nucleotide with the 3′-terminal nucleotide (which contains the CCA 3′-terminal group used to attach the amino acid), (iii) a CCA tail at the 3′-end of the tRNA molecule that is covalently bound to an amino acid (herein “aminoacyl-tRNA), (iv) a D arm domain, (v) an anticodon arm comprising an anticodon sequence. The tRNA 5′-to-3′ primary structure contains the anticodon but in reverse order, since 3′-to-5′ directionality is required to read the mRNA from 5′-to-3′, (vi) a T-arm domain, and (vii) a variable arm domain

[0082] The term “deaminase” or “deaminase domain” refers to a protein or enzyme that catalyzes a deamination reaction. In some embodiments, the deaminase is an adenosine (or adenine) deaminase, which catalyzes the hydrolytic deamination of adenine or adenosine. In some embodiments, the adenosine deaminase catalyzes the hydrolytic deamination of adenine or adenosine in deoxyribonucleic acid (DNA) to inosine. In other embodiments, the deaminase is a cytidine (or cytosine) deaminase, which catalyzes the hydrolytic deamination of cytidine or cytosine.

[0083] The deaminases provided herein may be from any organism, such as a bacterium. In some embodiments, the deaminase or deaminase domain is a variant of a naturally-occurring deaminase from an organism. In some embodiments, the deaminase or deaminase domain does not occur in nature. For example, in some embodiments, the deaminase or deaminase domain is at least 50%, at least 55%, at least 60%, at least 65%, at least 70%, at least 75% at least 80%, at least 85%, at least 90%, at least 95%, at least 96%, at least 97%, at least 98%, at least 99%, or at least 99.5% identical to a naturally-occurring deaminase.

[0084] As used herein, the term “adenosine deaminase” or “adenosine deaminase domain” refers to a protein or enzyme that catalyzes a deamination reaction of an adenosine (or adenine). The terms “adenosine” and “adenine” are used interchangeably for purposes of the present disclosure. For example, for purposes of the disclosure, reference to an “adenine base editor” (ABE) refers to the same entity as an “adenosine base editor” (ABE). Similarly, for purposes of the disclosure, reference to an “adenine deaminase” refers to the same entity as an “adenosine deaminase.” However, the person having ordinary skill in the art will appreciate that “adenine” refers to the purine base whereas “adenosine” refers to the larger nucleoside molecule that includes the purine base (adenine) and sugar moiety (e.g., either ribose or deoxyribose). In certain embodiments, the disclosure provides base editor fusion proteins comprising one or more adenosine deaminase domains. For instance, an adenosine deaminase domain may comprise a heterodimer of a first adenosine deaminase and a second deaminase domain, connected by a linker. Adenosine deaminases (e.g., engineered adenosine deaminases or evolved adenosine deaminases) provided herein may be enzymes that convert adenine (A) to inosine (I) in DNA or RNA. Such adenosine deaminase can lead to an A:T to G:C base pair conversion. In some embodiments, the deaminase is a variant of a naturally-occurring deaminase from an organism. In some embodiments, the deaminase does not occur in nature. For example, in some embodiments, the deaminase is at least 50%, at least 55%, at least 60%, at least 65%, at least 70%, at least 75% at least 80%, at least 85%, at least 90%, at least 95%, at least 96%, at least 97%, at least 98%, at least 99%, or at least 99.5% identical to a naturally-occurring deaminase.

[0085] In some embodiments, the adenosine deaminase is derived from a bacterium, such as, E. coli, S. aureus, S. typhi, S. putrefaciens, H. influenzae, or C. crescentus. In some embodiments, the adenosine deaminase is a TadA deaminase. In some embodiments, the TadA deaminase is an E. coli TadA deaminase (ecTadA). In some embodiments, the TadA deaminase is a truncated E. coli TadA deaminase. For example, the truncated ecTadA may be missing one or more N-terminal amino acids relative to a full-length ecTadA. In some embodiments, the truncated ecTadA may be missing 1, 2, 3, 4, 5, 6, 7, 8, 9, 10, 11, 12, 13, 14, 15, 6, 17, 18, 19, or 20 N-terminal amino acid residues relative to the full length ecTadA. In some embodiments, the truncated ecTadA may be missing 1, 2, 3, 4, 5, 6, 7, 8, 9, 10, 11, 12, 13, 14, 15, 6, 17, 18, 19, or 20 C-terminal amino acid residues relative to the full length ecTadA. In some embodiments, the ecTadA deaminase does not comprise an N-terminal methionine. Reference is made to U.S. Patent Publication No. 2018/0073012, published Mar. 15, 2018, which is incorporated herein by reference.

[0086] As used herein, the term “cytidine deaminase” or “cytidine deaminase domain” refers to a protein or enzyme that catalyzes a deamination reaction of a cytidine or cytosine. The terms “cytidine” and “cytosine” are used interchangeably for purposes of the present disclosure. For example, for purposes of the disclosure, reference to an “cytosine base editor” (CBE) refers to the same entity as an “cytosine base editor” (CBE). Similarly, for purposes of the disclosure, reference to an “cytidine deaminase” refers to the same entity as an “cytosine deaminase.” However, the person having ordinary skill in the art will appreciate that “cytosine” refers to the pyrimidine base whereas “cytidine” refers to the larger nucleoside molecule that includes the pyrimidine base (cytosine) and sugar moiety (e.g., either ribose or deoxyribose). A cytidine deaminase is encoded by the CDA gene and is an enzyme that catalyzes the removal of an amine group from cytidine (i.e., the base cytosine when attached to a ribose ring, i.e., the nucleoside referred to as cytidine) to uridine (C to U) and deoxycytidine to deoxyuridine (C to U). A non-limiting example of a cytidine deaminase is APOBEC1 (“apolipoprotein B mRNA editing enzyme, catalytic polypeptide 1”). Another example is AID (“activation-induced cytidine deaminase”). Under standard Watson-Crick hydrogen bond pairing, a cytosine base hydrogen bonds to a guanine base. When cytidine is converted to uridine (or deoxycytidine is converted to deoxyuridine), the uridine (or the uracil base of uridine) undergoes hydrogen bond pairing with the base adenine. Thus, a conversion of “C” to uridine (“U”) by cytidine deaminase will cause the insertion of “A” instead of a “G” during cellular repair and/or replication processes. Since the adenine “A” pairs with thymine “T”, the cytidine deaminase in coordination with DNA replication causes the conversion of an C-G pairing to a T-A pairing in the double-stranded DNA molecule.

[0087] The term “guide RNA” is a particular type of guide nucleic acid which is mostly commonly associated with a Cas protein of a CRISPR-Cas9 and which associates with Cas9, directing the Cas9 protein to a specific sequence in a DNA molecule that includes complementarity to protospacer sequence of the guide RNA. However, this term also embraces the equivalent guide nucleic acid molecules that associate with Cas9 equivalents, homologs, orthologs, or paralogs, whether naturally-occurring or non-naturally-occurring (e.g., engineered or recombinant), and which otherwise program the Cas9 equivalent to localize to a specific target nucleotide sequence. The Cas9 equivalents may include other napDNAbp from any type of CRISPR system (e.g., type II, V, VI), including Cpf1 (a type-V CRISPR-Cas systems), C2c1 (a type V CRISPR-Cas system), C2c2 (a type VI CRISPR-Cas system) and C2c3 (a type V CRISPR-Cas system). Further Cas-equivalents are described in Makarova et al., “C2c2 is a single-component programmable RNA-guided RNA-targeting CRISPR effector,” Science 2016; 353(6299), the contents of which are incorporated herein by reference. Exemplary sequences are and structures of guide RNAs are provided herein.

[0088] Guide RNAs may comprise various structural elements that include, but are not limited to (a) a spacer sequence—the sequence in the guide RNA (having ˜20 nts in length) which binds to a complementary strand of the target DNA (and has the same sequence as the protospacer of the DNA) and (b) a gRNA core (or gRNA scaffold or backbone sequence)—refers to the sequence within the gRNA that is responsible for Cas9 binding, it does not include the ˜20 bp spacer sequence that is used to guide Cas9 to target DNA.

[0089] As used herein, the “guide RNA target sequence” refers to the ˜20 nucleotides that are complementary to the protospacer sequence in the PAM strand. The target sequence is the sequence that anneals to or is targeted by the spacer sequence of the guide RNA. The spacer sequence of the guide RNA and the protospacer have the same sequence (except the spacer sequence is RNA and the protospacer is DNA).

[0090] As used herein, the “guide RNA scaffold sequence” refers to the sequence within the gRNA that is responsible for Cas9 binding, it does not include the 20 bp spacer/targeting sequence that is used to guide Cas9 to target DNA.

[0091] The term “uracil glycosylase inhibitor” or “UGI,” as used herein, refers to a protein that is capable of inhibiting a uracil-DNA glycosylase base-excision repair enzyme. In some embodiments, a UGI domain comprises a wild-type UGI or a UGI as set forth in SEQ ID NO: 2. In some embodiments, the UGI proteins provided herein include fragments of UGI and proteins homologous to a UGI or a UGI fragment. For example, in some embodiments, a UGI domain comprises a fragment of the amino acid sequence set forth in SEQ ID NO: 2. In some embodiments, a UGI fragment comprises an amino acid sequence that comprises at least 60%, at least 65%, at least 70%, at least 75%, at least 80%, at least 85%, at least 90%, at least 95%, at least 96%, at least 97%, at least 98%, at least 99%, or at least 99.5% of the amino acid sequence as set forth in SEQ ID NO: 2. In some embodiments, a UGI comprises an amino acid sequence homologous to the amino acid sequence set forth in SEQ ID NO: 2, or an amino acid sequence homologous to a fragment of the amino acid sequence set forth in SEQ ID NO: 2. In some embodiments, proteins comprising UGI or fragments of UGI or homologs of UGI or UGI fragments are referred to as “UGI variants.” A UGI variant shares homology to UGI, or a fragment thereof. For example, a UGI variant is at least 70% identical, at least 75% identical, at least 80% identical, at least 85% identical, at least 90% identical, at least 95% identical, at least 96% identical, at least 97% identical, at least 98% identical, at least 99% identical, at least 99.5% identical, or at least 99.9% identical to a wild type UGI or a UGI as set forth in SEQ ID NO: 2. In some embodiments, the UGI variant comprises a fragment of UGI, such that the fragment is at least 70% identical, at least 80% identical, at least 90% identical, at least 95% identical, at least 96% identical, at least 97% identical, at least 98% identical, at least 99% identical, at least 99.5% identical, or at least 99.9% to the corresponding fragment of wild-type UGI or a UGI as set forth in SEQ ID NO: 2. In some embodiments, the UGI comprises the following amino acid sequence:

(SEQ ID NO: 2)
MTNLSDIIEKETGKQLVIQESILMLPEEVEEVIGNKPESDILVHTAYDES
TDENVMLLTSDAPEYKPWALVIQDSNGENKIKML
(P14739|UNGI_BPPB2 Uracil-DNA glycosylase
inhibitor).

### DETAILED DESCRIPTION

[0092] Aspects of the disclosure relate to methods, compositions, and systems for editing a DNA sequence encoding an endogenous tRNA into a suppressor tRNA using base editing (e.g., to treat a disease caused by a premature termination codon or PTC). Additional aspects relate to compositions comprising a gRNA configured to bind to a DNA sequence encoding an endogenous tRNA. Other aspects relate to complexes comprising a base editor and a gRNA that are capable of editing an endogenous tRNA into a suppressor tRNA. In some aspects, the disclosure further relates to polynucleotides encoding one or more nucleic acid sequences encoding the gRNAs, vectors comprising the polynucleotides, and/or cells comprising the polynucleotides, complexes, gRNAs, and/or vectors disclosed herein. Additional aspects further relate to kits comprising any one of the compositions, complexes, gRNAs, polynucleotides, vectors, and/or cells disclosed herein.

[0093] As defined elsewhere herein, suppressor tRNAs are tRNAs that are natively charged with their cognate amino acids but possess engineered anticodon loops designed to bind PTCs (e.g., amber, ochre, or opal stop codons). As such, suppressor tRNAs bind to PTCs during the process of translation, leading to incorporation of an amino acid instead of terminating translation. Without wishing to be bound by theory, suppressor tRNAs were recently used to rescue a genetic disease in a mouse model carrying a nonsense mutation, but the suppressor tRNA was delivered via an adeno-associated viral vector (herein “AAV”). It is generally known in the art that permanent expression of the suppressor tRNA is necessary for continued rescue of the disease, which is challenging to achieve using AAV and requires repeated administration of the suppressor tRNA vector.

[0094] It is generally recognized in the art that humans possess over 500 interspersed tRNA genes, and many of these genes are redundant and dispensable. For example, one or both copies of the tRNA^{Lys} CUU gene is deleted in ˜50% of humans¹². Therefore, using base editing to convert the CUU anticodon of this tRNA^{Lys} gene into UUA, UCA, or CUA for ochre, opal, and amber suppression, respectively, would generate an endogenous suppressor tRNA^{Lys}. Thus, in some embodiments, the endogenous, tRNA is a tRNA^{Lys} CUU gene. In this particular embodiment, lysine would be installed at the locations of the PTCs. In other embodiments, the tRNA gene is any gene sequence known in the art (e.g., human tRNA genes are listed in Table 1).

[0095] In other embodiments, other domains in the tRNA gene may be edited to modify the identity of the amino acid that is charged onto the suppressor tRNA. For example, base editing may be used to install a C70U mutation in the acceptor stem of tRNA^{Lys}; this mutation is known to change the identity of the charged amino acid to alanine¹³. Other edits within the acceptor stem domain and/or other domains (e.g., D-arm, T-arm, anticodon arm, or variable arm) may also be used to alter the identity of the charged amino acid.

[0096] In some embodiments, the choice of amino acid inserted in response to a stop codon is tailored by the choice of tRNA to edit and/or by installing sequences recognized by specific aminoacyl-tRNA synthetase enzymes to direct amino acid charging of the newly generated suppressor tRNA. In some embodiments, suppression with widely tolerated amino acids such as glycine, alanine, or serine may be preferable to suppression with more unusual amino acids such as proline or arginine or tryptophan, except when treating diseases caused by premature stop codons that have arisen from mutation of these amino acids. For example, Arg to STOP mutations are a common cause of genetic diseases, and in these cases, base editing to create an arginine-charged suppressor tRNA may be especially desirable.

[0097] As such, some aspects of the present disclosure are related to methods for editing a DNA sequence encoding an endogenous tRNA at a target site. In some embodiments, the target site in the DNA sequence encodes one or more domains of the endogenous tRNA. tRNA domains are known in the art and comprise the D-arm domain, T-arm domain, variable arm domain, acceptor stem domain and a anticodon arm domain comprising an anticodon sequence.

[0098] As used herein, the term “D arm domain” refers to a feature in the tertiary structure of tRNA. Without wishing to be bound by theory, it comprises two D stems and the D loop. The D loop further comprises the base dihydrouridine, for which the arm is named. The D-loops main function is recognition. It is widely believed that it acts as a recognition site for aminoacyl-tRNA synthetase, an enzyme involved in the aminoacylation of the tRNA molecule.

[0099] As used herein, the term “T-arm domain” refers to a specialized region of the tRNA which acts as a special recognition site for the ribosome to form a tRNA-ribosome complex during protein biosynthesis (e.g., translation). The T-arm domain is generally believed to have two components: a T-stem and T-loop. There are two T-stems of five base pairs each. The T-loop is often referred to as the TTC arm due to the presence of thymidine, pseudouridine and cytidine.

[0100] As used herein, the term “anticodon arm domain” refers to a 5-bp stem whose loop contains the anticodon. The anticodon portion of the tRNA binds to the codon sequence in mRNA during translation.

[0101] As used herein, the term “variable arm domain” refers to a loop that present between the anticodon arm and the TTC arm. The length of the variable arm domain is important in the recognition of the aminoacyl-tRNA synthetase for the tRNA. In some embodiments, the tRNA lacks the variable arm domain.

[0102] In some embodiments, the endogenous tRNA anticodon sequence is a single transition mutation away from a nonsense suppressor anticodon. As defined elsewhere herein, a nonsense suppressor anticodon is the complementary sequence to a premature termination codon or PTC. There are currently 3 known PTCs, each of which, comprises a different sequence. The ochre stop codon has sequence 5′ UAA 3′ and corresponds to nonsense suppressor anticodon with sequence 5′-UUA-3′. The opal stop codon has sequence 5′ UGA 3′ and corresponds to the nonsense suppressor anticodon with sequence 5′-UCA-3′. The amber stop codon has sequence 5′ UAG 3 and corresponds to nonsense suppressor anticodon with sequence 5′-CUA-3′.

[0103] The single transition mutation may be any transition mutation known in the art. For example, in some embodiments, the single transition mutation consists of a C>T (e.g., C-to-T) mutation, a T>C mutation (e.g., T-to-C) mutation, an A>G (e.g., A-to-G) mutation, and a G>A (G-to-A) mutation.

[0104] In some embodiments, the endogenous tRNA comprises an anticodon sequence that is a single transversion mutation away from a nonsense suppressor anticodon. The single transversion mutation may be any transversion mutation known in the art. For example, in some embodiments, the single transversion mutation is selected from the group consisting of an A>C (e.g., A-to-C) mutation, T>G (T-to-G) mutation, G>T (G-to-T) mutation, C>A (C-to-A) mutation, C>G (C-to-G) mutation, G>C (G-to-C) mutation, A>T (A-to-T) mutation, and T>A (T-to-A) mutation.

[0105] In some embodiments, the endogenous tRNA comprises an anticodon sequence that is 3′-X1-X2-X3-5′. In some embodiments, the base editor installs the mutation (e.g., transition or transversion) at position XL. In some embodiments, the mutation is selected from the group consisting of G>A, C>A, and U>A, relative to the endogenous tRNA. In some embodiments, the anticodon sequence comprises a N>A mutation at X1, C at X2, and U at X3, wherein N is G, C, or U (e.g., which is configured to bind to the PTC 5′-UGA-3′). In some embodiments, the anticodon sequence comprises a N>A mutation at X1, U at X2, and C at X3, wherein N is G, C, or U (e.g., which is configured to bind to the PTC 5′-UAG-3′). In some embodiments, the anticodon sequence comprises a N>A mutation at X1, U at X2, and U at X3, wherein N is G, C, or U (e.g., which is configured to bind to the PTC 5′-UAA-3′).

[0106] In some embodiments, the base editor installs the mutation (e.g., transition or transversion) at position X2. In some embodiments, the mutation is selected from the group consisting of A>C, G>C, and U>C, relative to the endogenous tRNA. In some embodiments, the anticodon sequence comprises an A at X1, an N>C mutation at X2, and a U at X3, wherein N is A, G, U (e.g., which is configured to bind to PTC 5′-UGA-3′).

[0107] In some embodiments, the mutation is selected from the group consisting of A>U, G>U, or C>U at position X2, relative to the endogenous tRNA. In some embodiments, the anticodon sequence comprises an A at X1, an N>U mutation at X2, and a C at X3, wherein N is A, G, or C (e.g., which is configured to bind to PTC 5′-UAG-3′). In some embodiments, the anticodon sequence comprises an A at X1, a N>U mutation at X2, and C at X3, wherein N is A, G, or C (e.g., which is configured to bind to PTC 5′-UAG-3′). In some embodiments, the anticodon sequence comprises an A at X1, a N>U mutation at X2, and a U at X3, wherein N is A, G, or C (e.g., which is configured to bind to PTC 5′-UAA-3′).

[0108] In some embodiments, the base editor installs the mutation (e.g., transition or transversion) at position X3. In some embodiments, the mutation is selected from the group consisting of A>U, G>U, and C>U, relative to the endogenous tRNA. In some embodiments, the anticodon sequence comprises an A at X1, a C at X2, and a N>U at X3, wherein N is an A, G, or C (e.g., which is configured to bind to PTC 5′-UGA-3′). In some embodiments, the anticodon sequence comprises an A at X1, a U at X2 and a N>U at X3, wherein N is an A, G, or C (e.g., which is configured to bind to PTC 5′-UAA-3′).

[0109] In some embodiments, the mutation is selected from the group consisting of U>C, A>C, and G>C at position X3, relative to the endogenous tRNA. In some embodiments, the anticodon sequence comprises an A at X1, a U at X2 and a N>C at X3, wherein N is U, A, or G (e.g., which is configured to bind to PTC 5′-UAG-3′)

[0110] Other aspects of the present disclosure relate to compositions comprising the edited tRNAs described herein. While it is generally known that translational stop codon readthrough provides a regulatory mechanism of gene expression this extensively utilized by positive-sense ssRNA viruses, no such mechanism has been observed in humans. In other words, suppressor tRNAs are not naturally found and/or naturally occurring in humans. Thus, in some embodiments, the compositions comprise one or more suppressor tRNA engineered from endogenous tRNAs. In some embodiments, the suppressor tRNA comprise a nonsense suppressor anticodon sequence selected from the group consisting of 5′-UUA-3′, 5′-UCA-3′ and 5′-CUA-3′. In some embodiments, the suppressor tRNA further comprises an amino acid selected from the group consisting of alanine, arginine, asparagine, aspartic acid, cysteine, glutamine, glutamic acid, glycine, histidine, isoleucine, leucine, methionine, phenylalanine, proline, serine, threonine, tryptophan, tyrosine, valine, pyrrolysine, and selenocysteine.

[0111] Some aspects of the disclosure further relate to guide RNA comprising a spacer sequence that binds to a complementary strand of a target DNA and a gRNA core that mediates binding of a base editor to the DNA, wherein the spacer sequence is any sequence listed in Table 2.

[0112] In some embodiments, the gRNA comprises a spacer sequence with at least 90%, at least 95%, at least 98%, at least 99%, at least 99.5%, or at least 99.8% sequence identity to any sequence listed in Table 2.

[0113] In some embodiments, the spacer sequence comprises least 90%, at least 95%, at least 98%, at least 99%, at least 99.5%, or at least 99.8% sequence identity to CTGATCCGAAGTCAGACGCC (SEQ ID NO: 3).

[0114] In some embodiments, the spacer sequence comprises least 90%, at least 95%, at least 98%, at least 99%, at least 99.5%, or at least 99.8% sequence identity to TCTGCAGTCAAATGCTCTAC (SEQ ID NO. 4).

[0115] In some embodiments, the spacer sequence comprises least 90%, at least 95%, at least 98%, at least 99%, at least 99.5%, or at least 99.8% sequence identity to TTGATTTGCAGTCAAATGCTC (SEQ ID NO: 5).

[0116] In some embodiments, the spacer sequence comprises least 90%, at least 95%, at least 98%, at least 99%, at least 99.5%, or at least 99.8% sequence identity to GGATTCAGAGTCCAGAGTGC (SEQ ID NO: 6).

[0117] In some embodiments, the spacer sequence comprises least 90%, at least 95%, at least 98%, at least 99%, at least 99.5%, or at least 99.8% sequence identity to TGGATTCAAAGCCCAGAGTG (SEQ ID NO: 7).In some embodiments, the spacer sequence comprises least 90%, at least 95%, at least 98%, at least 99%, at least 99.5%, or at least 99.8% sequence identity to CGCTCTCACCGCCGCGGCCC (SEQ ID NO: 8).

[0118] In some embodiments, the spacer sequence comprises least 90%, at least 95%, at least 98%, at least 99%, at least 99.5%, or at least 99.8% sequence identity to GGTTTTCACCCAGGTGGCCC (SEQ ID NO: 9).

[0119] In some embodiments, the spacer sequence comprises least 90%, at least 95%, at least 98%, at least 99%, at least 99.5%, or at least 99.8% sequence identity to TTGCCTTCCAAGCAGTTGAC (SEQ ID NO: 10).

[0120] In some embodiments, the spacer sequence comprises least 90%, at least 95%, at least 98%, at least 99%, at least 99.5%, or at least 99.8% sequence identity to GACTCCAGATCAGAAGGCTG (SEQ ID NO. 11).

[0121] In some embodiments, the spacer sequence comprises least 90%, at least 95%, at least 98%, at least 99%, at least 99.5%, or at least 99.8% sequence identity to CTACAGTCCTCCGCTCTACC (SEQ ID NO: 12).

[0122] In some embodiments, the spacer sequence comprises least 90%, at least 95%, at least 98%, at least 99%, at least 99.5%, or at least 99.8% sequence identity to GATTTCAAGTCCAACGCCTT (SEQ ID NO: 13).

[0123] In some embodiments, the spacer sequence comprises least 90%, at least 95%, at least 98%, at least 99%, at least 99.5%, or at least 99.8% sequence identity to GATTTCGAGTCCAACACCTT (SEQ ID NO: 14).

[0124] In some embodiments, the spacer sequence comprises least 90%, at least 95%, at least 98%, at least 99%, at least 99.5%, or at least 99.8% sequence identity to ACTATAGCTACTTCCTCAGT (SEQ ID NO: 15).

[0125] In some embodiments, the spacer sequence comprises least 90%, at least 95%, at least 98%, at least 99%, at least 99.5%, or at least 99.8% sequence identity to GGACTTAAGATCCAATGGGC (SEQ ID NO: 16).

[0126] Other spacer sequences are also possible in other embodiments.

[0127] Additional aspects of the disclosure relate to compositions comprising a base editor and a guide RNA and any complexes formed thereof. In some embodiments, the guide RNA comprises a spacer sequence configured to bind to one or more tRNA genes.

[0128] Other aspects of the disclosure relate to polynucleotides, cells, pharmaceutical compositions and kits. For example, in some aspects, the disclosure relates to a polynucleotide comprising a first nucleic acid sequence encoding a base editor and a second nucleic acid sequence encoding a guide RNA, wherein the guide RNA comprises a spacer sequence configured to bind to one or more tRNA genes (e.g., see Table 2).

[0129] In some aspects, the disclosure relates to cells comprising any one of the polynucleotides disclosed herein. In some embodiments, the cell is an animal cell. In some embodiments, the animal cell is a mammalian cell, a non-human primate cell, or a human cell. In other embodiments, the cell is a plant cell.

[0130] In some aspects, the disclosure relates to pharmaceutical compositions comprising any one of the compositions, pegRNAs, complexes, polynucleotides, and cells disclose herein, or any combination thereof, and a pharmaceutical excipient.

[0131] In some aspects, the disclosure relates to kits comprising any one of the compositions, guide RNAs, complexes, polynucleotides, and cells disclose herein, or any combination thereof, and a pharmaceutical excipient, and instructions for editing a one or more DNA sequences encoding one or more domains of a tRNA by base editing, wherein the DNA sequence is any sequence that encodes a tRNA (e.g., see Table 1).

[0132] Other aspects of the disclosure relate to methods for changing the amino acid that is charged onto an endogenous tRNA. Without wishing to be bound by theory, it is generally recognized in the art that mutation of select nucleotides within one or more domains of the endogenous tRNA alters the aminoacyl-tRNA synthetase that recognizes the endogenous tRNA, and hence, charges the tRNA with a non-cognate amino acid. For example, tRNAs comprising a C70U mutation in the acceptor stem domain are charged alanine, regardless of their anticodon sequence. Thus, in some embodiments, the tRNAs edited with the base editors described herein, comprises an anticodon sequence that encodes for the cognate amino acid but are charged with a non-cognate amino acid.

[0133] In some embodiments, the methods comprise installing one or more edits in one or more domains, wherein the one or more edits changes the identity of the charged amino acid on the tRNA. Any tRNA domain known in the art may be edited, including, for example, the D-arm domain, T-arm domain, variable arm domain, acceptor stem domain, and the anticodon arm domain. In some embodiments, the base editor installs a transition mutation in the one or more domains. In other embodiments, the base editor installs a transversion mutation in the one or more domains.

[0134] In some embodiments, the cognate amino acid of the endogenous tRNA is selected from the group consisting of alanine, arginine, asparagine, aspartic acid, cysteine, glutamine, glutamic acid, glycine, histidine, isoleucine, leucine, methionine, phenylalanine, proline, serine, threonine, tryptophan, tyrosine, valine, pyrrolysine, selenocysteine.

[0135] In some embodiments, the non-cognate amino acid of the endogenous tRNA is selected from the group consisting of alanine, arginine, asparagine, aspartic acid, cysteine, glutamine, glutamic acid, glycine, histidine, isoleucine, leucine, methionine, phenylalanine, proline, serine, threonine, tryptophan, tyrosine, valine, pyrrolysine, and selenocysteine.

[0136] Additional aspects of the disclosure relate to methods for producing a suppressor tRNA molecules from an endogenous tRNA molecule using base editing in a subject in need thereof, the method comprising administering to the subject: (i) a base editor and (ii) a guide RNA, wherein the base editor and the gRNA install a mutation at a target site in a DNA sequence encoding the tRNA molecule, wherein installation of the mutation converts the endogenous tRNA molecule into the suppressor tRNA molecule.

[0137] Other aspects relate to methods of treating a disease caused by premature termination codons in a subject in need thereof, the method comprising administering to the subject (i) a base editor and (ii) a guide RNA, wherein the base editor and guide RNA form a base editor complex, wherein the base editor complex mutates a target DNA sequence encoding one or more domains of a tRNA to produce a suppressor tRNA, wherein the suppressor tRNA comprises an anticodon sequence complementary to an ochre stop codon, an opal stop codon, or an amber stop codon.

[0138] In some embodiments, the endogenous tRNA comprises an anticodon sequence that is 3′-X1-X2-X3-5′. In some embodiments, the base editor installs the mutation (e.g., transition or transversion) at position XL. In some embodiments, the mutation is selected from the group consisting of G>A, C>A, and U>A, relative to the endogenous tRNA. In some embodiments, the anticodon sequence comprises a N>A mutation at X1, C at X2, and U at X3, wherein N is G, C, or U (e.g., which is configured to bind to the PTC 5′-UGA-3′). In some embodiments, the anticodon sequence comprises a N>A mutation at X1, U at X2, and C at X3, wherein N is G, C, or U (e.g., which is configured to bind to the PTC 5′-UAG-3′). In some embodiments, the anticodon sequence comprises a N>A mutation at X1, U at X2, and U at X3, wherein N is G, C, or U (e.g., which is configured to bind to the PTC 5′-UAA-3′).

[0139] In some embodiments, the base editor installs the mutation (e.g., transition or transversion) at position X2. In some embodiments, the mutation is selected from the group consisting of A>C, G>C, and U>C, relative to the endogenous tRNA. In some embodiments, the anticodon sequence comprises an A at X1, an N>C mutation at X2, and a U at X3, wherein N is A, G, U (e.g., which is configured to bind to PTC 5′-UGA-3′).

[0140] In some embodiments, the mutation is selected from the group consisting of A>U, G>U, or C>U at position X2, relative to the endogenous tRNA. In some embodiments, the anticodon sequence comprises an A at X1, an N>U mutation at X2, and a C at X3, wherein N is A, G, or C (e.g., which is configured to bind to PTC 5′-UAG-3′). In some embodiments, the anticodon sequence comprises an A at X1, a N>U mutation at X2, and C at X3, wherein N is A, G, or C (e.g., which is configured to bind to PTC 5′-UAG-3′). In some embodiments, the anticodon sequence comprises an A at X1, a N>U mutation at X2, and a U at X3, wherein N is A, G, or C (e.g., which is configured to bind to PTC 5′-UAA-3′).

[0141] In some embodiments, the base editor installs the mutation (e.g., transition or transversion) at position X3. In some embodiments, the mutation is selected from the group consisting of A>U, G>U, and C>U, relative to the endogenous tRNA. In some embodiments, the anticodon sequence comprises an A at X1, a C at X2, and a N>U at X3, wherein N is an A, G, or C (e.g., which is configured to bind to PTC 5′-UGA-3′). In some embodiments, the anticodon sequence comprises an A at X1, a U at X2 and a N>U at X3, wherein N is an A, G, or C (e.g., which is configured to bind to PTC 5′-UAA-3′).

[0142] In some embodiments, the mutation is selected from the group consisting of U>C, A>C, and G>C at position X3, relative to the endogenous tRNA. In some embodiments, the anticodon sequence comprises an A at X1, a U at X2 and a N>C at X3, wherein N is U, A, or G (e.g., which is configured to bind to PTC 5′-UAG-3′).

[0143] In some embodiments, the anticodon sequence complementary to the ochre stop codon is 5′-UUA-3′. In some embodiments, the anticodon sequence complementary to the opal stop codon is 5′-UCA-3′. In some embodiments, the anticodon sequence complementary to the amber stop codon is 5′-CUA-3′.

[0144] Other aspects relate to methods for treating a disease caused by premature termination codons, the method comprising mutating an endogenous tRNA gene into a suppressor tRNA gene using base editing, the method comprising administering to a subject (i) a base editor and (ii) a guide RNA, wherein the suppressor tRNA gene encodes a suppressor tRNA molecule comprising an anticodon sequence configured to bind to an ochre stop codon, an opal stop codon, or an amber stop codon.

[0145] Non-limiting examples of diseases caused by premature termination codons (e.g., nonsense mutations) include cystic fibrosis, beta thalassemia, Hurler syndrome, Dravet syndrome, Duchenne muscular dystrophy, Usher syndrome, and hemophilia. These examples are meant to be nonlimiting and the skilled artisan will understand that the methods disclosed herein may be used to treat any disease (e.g., known or yet to be determined) caused by premature termination codons (e.g., nonsense mutations).

TABLE 1
Exemplary embodiments of human tRNA gene sequences
(hg38 genome assembly) that may be edited using any
of the base editors/gRNAs disclosed herein.

| tRNA | | | SEQ |
|---|---|---|---|
| gene | Genomic | | ID |
| name | coordinates | Sequence | NO: |
| Homo_ | chr6: | GGGGGTATAGCTCAGTGGTAGAGCGCGTGC | 167 |
| sapiens_ | 28795964- | TTAGCATGCACGAGGTCCTGGGTTCGATCC | |
| tRNA- | 28796035 | CCAGTACCTCCA | |
| Ala- | (−) | | |
| AGC- | | | |
| 1- | | | |
| 1 | | | |
| Homo_ | chr6: | GGGGAATTAGCTCAAGTGGTAGAGCGCTTG | 168 |
| sapiens_ | 26687257- | CTTAGCACGCAAGAGGTAGTGGGATCGATG | |
| tRNA- | 26687329 | CCCACATTCTCCA | |
| Ala- | (+) | | |
| AGC- | | | |
| 10- | | | |
| 1 | | | |
| Homo_ | chr6: | GGGGAATTAGCTCAAGTGGTAGAGCGCTTG | 169 |
| sapiens_ | 26814339- | CTTAGCACGCAAGAGGTAGTGGGATCGATG | |
| tRNA- | 26814411 | CCCACATTCTCCA | |
| Ala- | (−) | | |
| AGC- | | | |
| 10- | | | |
| 2 | | | |
| Homo_ | chr6: | GGGGAATTAGCTCAAATGGTAGAGCGCTCG | 170 |
| sapiens_ | 26571864- | CTTAGCATGCGAGAGGTAGCGGGATCGATG | |
| tRNA- | 26571936 | CCCGCATTCTCCA | |
| Ala- | (−) | | |
| AGC- | | | |
| 11- | | | |
| 1 | | | |
| Homo_ | chr6: | GGGGAATTAGCTCAAGTGGTAGAGCGCTTG | 171 |
| sapiens_ | 26682487- | CTTAGCATGCAAGAGGTAGTGGGATCGATG | |
| tRNA- | 26682559 | CCCACATTCTCCA | |
| Ala- | (+) | | |
| AGC- | | | |
| 12- | | | |
| 1 | | | |
| Homo_ | chr6: | GGGGAATTAGCTCAAGTGGTAGAGCGCTTG | 172 |
| sapiens_ | 26819109- | CTTAGCATGCAAGAGGTAGTGGGATCGATG | |
| tRNA- | 26819181 | CCCACATTCTCCA | |
| Ala- | (−) | | |
| AGC- | | | |
| 12- | | | |
| 2 | | | |
| Homo_ | chr6: | GGGGAATTAGCTCAAGTGGTAGAGCGCTTG | 173 |
| sapiens_ | 57856401- | CTTAGCATGCAAGAGGTAGTGGGATCGATG | |
| tRNA- | 57856473 | CCCACATTCTCCA | |
| Ala- | (−) | | |
| AGC- | | | |
| 12- | | | |
| 3 | | | |
| Homo_ | chr6: | GGGGAATTAGCTCAAGCGGTAGAGCGCTTG | 174 |
| sapiens_ | 26705377- | CTTAGCATGCAAGAGGTAGTGGGATCGATG | |
| tRNA- | 26705449 | CCCACATTCTCCA | |
| Ala- | (+) | | |
| AGC- | | | |
| 13- | | | |
| 1 | | | |
| Homo_ | chr6: | GGGGAATTAGCTCAAGCGGTAGAGCGCTTG | 175 |
| sapiens_ | 57838350- | CTTAGCATGCAAGAGGTAGTGGGATCGATG | |
| tRNA- | 57838422 | CCCACATTCTCCA | |
| Ala- | (−) | | |
| AGC- | | | |
| 13- | | | |
| 2 | | | |
| Homo_ | chr6: | GGGGAATTAGCTCAAGCGGTAGAGCGCTTG | 176 |
| sapiens_ | 26796209- | CTTAGCATGCAAGAGGTAGTGGGATCGATG | |
| tRNA- | 26796281 | CCCACATTCTCCA | |
| Ala- | (−) | | |
| AGC- | | | |
| 13- | | | |
| 3 | | | |
| Homo_ | chr6: | GGGGAATTAGCTCAAGTGGTAGAGCGCTTG | 177 |
| sapiens_ | 26673362- | CTTAGCATGCAAGAGGTAGTGGGATCAATG | |
| tRNA- | 26673434 | CCCACATTCTCCA | |
| Ala- | (+) | | |
| AGC- | | | |
| 14- | | | |
| 1 | | | |
| Homo_ | chr6: | GGGGAATTAGCTCAAGTGGTAGAGCGCTTG | 178 |
| sapiens_ | 26828227- | CTTAGCATGCAAGAGGTAGTGGGATCAATG | |
| tRNA- | 26828299 | CCCACATTCTCCA | |
| Ala- | (−) | | |
| AGC- | | | |
| 14- | | | |
| 2 | | | |
| Homo_ | chr14: | GGGGAATTAGCTCAAGTGGTAGAGCGCTCG | 179 |
| sapiens_ | 88979098- | CTTAGCATGCGAGAGGTAGTGGGATCGATG | |
| tRNA- | 88979170 | CCCGCATTCTCCA | |
| Ala- | (+) | | |
| AGC- | | | |
| 15- | | | |
| 1 | | | |
| Homo_ | chr6: | GGGGAATTAGCCCAAGTGGTAGAGCGCTTG | 180 |
| sapiens_ | 57870345- | CTTAGCATGCAAGAGGTAGTGGGATCGATG | |
| tRNA- | 57870417 | CCCACATTCTCCA | |
| Ala- | (−) | | |
| AGC- | | | |
| 16- | | | |
| 1 | | | |
| Homo_ | chr6: | GGGGGTGTAGCTCAGTGGTAGAGCGCGTGC | 181 |
| sapiens_ | 28838444- | TTAGCATGCACGAGGCCCCGGGTTCAATCC | |
| tRNA- | 28838515 | CCGGCACCTCCA | |
| Ala- | (−) | | |
| AGC- | | | |
| 2- | | | |
| 1 | | | |
| Homo_ | chr6: | GGGGGTGTAGCTCAGTGGTAGAGCGCGTGC | 182 |
| sapiens_ | 28863685- | TTAGCATGCACGAGGCCCCGGGTTCAATCC | |
| tRNA- | 28863756 | CCGGCACCTCCA | |
| Ala- | (−) | | |
| AGC- | | | |
| 2- | | | |
| 2 | | | |
| Homo_ | chr6: | GGGGAATTAGCTCAAGCGGTAGAGCGCTTG | 183 |
| sapiens_ | 57815974- | CTTAGCATGCAAGAGGTAGCAGGATCGATG | |
| tRNA- | 57816046 | CCTGCATTCTCCA | |
| Ala- | (−) | | |
| AGC- | | | |
| 24- | | | |
| 1 | | | |
| Homo_ | chr6: | GGGGGTGTAGCTCAGTGGTAGAGCGCGTGC | 184 |
| sapie | 2860 | TTAGCATGTACGAGGTCCCGGGTTCAATCC | |
| ns_ | 7156- | CCGGCACCTCCA | |
| tRNA- | 28607227 | | |
| Ala- | (+) | | |
| AGC- | | | |
| 3- | | | |
| 1 | | | |
| Homo_ | chr6: | GGGGATGTAGCTCAGTGGTAGAGCGCATGC | 185 |
| sapiens_ | 28658237- | TTAGCATGCATGAGGTCCCGGGTTCGATCC | |
| tRNA- | 28658308 | CCAGCATCTCCA | |
| Ala- | (−) | | |
| AGC- | | | |
| 4- | | | |
| 1 | | | |
| Homo_ | chr6: | GGGGGTGTAGCTCAGTGGTAGAGCGCGTGC | 186 |
| sapiens_ | 28710589- | TTAGCATGCACGAGGCCCTGGGTTCAATCC | |
| tRNA- | 28710660 | CCAGCACCTCCA | |
| Ala- | (+) | | |
| AGC- | | | |
| 5- | | | |
| 1 | | | |
| Homo_ | chr6: | GGGGGTATAGCTCAGCGGTAGAGCGCGTGC | 187 |
| sapiens_ | 28812072- | TTAGCATGCACGAGGTCCTGGGTTCAATCC | |
| tRNA- | 28812143 | CCAATACCTCCA | |
| Ala- | (−) | | |
| AGC- | | | |
| 6- | | | |
| 1 | | | |
| Homo_ | chr6: | GGGGGTGTAGCTCAGTGGTAGAGCGCGTGC | 188 |
| sapiens_ | 28719704- | TTAGCATGCACGAGGCCCCGGGTTCAATCC | |
| tRNA- | 28719775+) | CCGGCACCTCCA | |
| Ala- | | | |
| AGC- | | | |
| 7- | | | |
| 1 | | | |
| Homo_ | chr2: | GGGGGATTAGCTCAAATGGTAGAGCGCTCG | 189 |
| sapiens_ | 27051214- | CTTAGCATGCGAGAGGTAGCGGGATCGATG | |
| tRNA- | 27051286 | CCCGCATCCTCCA | |
| Ala- | (+) | | |
| AGC- | | | |
| 8- | | | |
| 1 | | | |
| Homo_ | chr8: | GGGGGATTAGCTCAAATGGTAGAGCGCTCG | 190 |
| sapiens_ | 66114189- | CTTAGCATGCGAGAGGTAGCGGGATCGATG | |
| tRNA- | 66114261 | CCCGCATCCTCCA | |
| Ala- | | | |
| AGC- | | | |
| 8- | | | |
| 2 | | | |
| Homo_ | chr6: | GGGGAATTAGCTCAGGCGGTAGAGCGCTCG | 191 |
| sapiens_ | 26730534- | CTTAGCATGCGAGAGGTAGCGGGATCGACG | |
| tRNA- | 26730606 | CCCGCATTCTCCA | |
| Ala- | (+) | | |
| AGC- | | | |
| 9- | | | |
| 1 | | | |
| Homo_ | chr6: | GGGGAATTAGCTCAGGCGGTAGAGCGCTCG | 192 |
| sapiens_ | 26771080- | CTTAGCATGCGAGAGGTAGCGGGATCGACG | |
| tRNA- | 26771152 | CCCGCATTCTCCA | |
| Ala- | (−) | | |
| AGC- | | | |
| 9- | | | |
| 2 | | | |
| Homo_ | chr6: | GGGGATGTAGCTCAGTGGTAGAGCGCATGC | 193 |
| sapiens_ | 26553503- | TTCGCATGTATGAGGTCCCGGGTTCGATCC | |
| tRNA- | 26553574 | CCGGCATCTCCA | |
| Ala- | (+) | | |
| CGC- | | | |
| 1- | | | |
| 1 | | | |
| Homo_ | chr6: | GGGGATGTAGCTCAGTGGTAGAGCGCATGC | 194 |
| sapiens_ | 28673836- | TTCGCATGTATGAGGCCCCGGGTTCGATCC | |
| tRNA- | 28673907 | CCGGCATCTCCA | |
| Ala- | (−) | | |
| CGC- | | | |
| 2- | | | |
| 1 | | | |
| Homo_ | chr2: | GGGGATGTAGCTCAGTGGTAGAGCGCGCGC | 195 |
| sapiens_ | 156400769- | TTCGCATGTGTGAGGTCCCGGGTTCAATCC | |
| tRNA- | 156400840 | CCGGCATCTCCA | |
| Ala- | (+) | | |
| CGC- | | | |
| 3- | | | |
| 1 | | | |
| Homo_ | chr6: | GGGGGTGTAGCTCAGTGGTAGAGCGCGTGC | 196 |
| sapiens_ | 28729315- | TTCGCATGTACGAGGCCCCGGGTTCGACCC | |
| tRNA- | 28729386 | CCGGCTCCTCCA | |
| Ala- | (+) | | |
| CGC- | | | |
| 4- | | | |
| 1 | | | |
| Homo_ | chr6: | GGGGGTGTAGCTCAGTGGTAGAGCGCATGC | 197 |
| sapiens_ | 28789770- | TTTGCATGTATGAGGTCCCGGGTTCGATCC | |
| tRNA- | 28789841 | CCGGCACCTCCA | |
| Ala- | (−) | | |
| TGC- | | | |
| 1- | | | |
| 1 | | | |
| Homo_ | chr6: | GGGGATGTAGCTCAGTGGTAGAGCGCATGC | 198 |
| sapiens_ | 28643445- | TTTGCATGTATGAGGTCCCGGGTTCGATCC | |
| tRNA- | 28643516 | CCGGCATCTCCA | |
| Ala- | (+) | | |
| TGC- | | | |
| 2- | | | |
| 1 | | | |
| Homo_ | chr5: | GGGGATGTAGCTCAGTGGTAGAGCGCATGC | 199 |
| sapiens_ | 181206868- | TTTGCATGTATGAGGCCCCGGGTTCGATCC | |
| tRNA- | 181206939 | CCGGCATCTCCA | |
| Ala- | (+) | | |
| TGC- | | | |
| 3- | | | |
| 1 | | | |
| Homo_ | chr12: | GGGGATGTAGCTCAGTGGTAGAGCGCATGC | 200 |
| sapiens_ | 124921755- | TTTGCATGTATGAGGCCCCGGGTTCGATCC | |
| tRNA- | 124921826 | CCGGCATCTCCA | |
| Ala- | (−) | | |
| TGC- | | | |
| 3- | | | |
| 2 | | | |
| Homo_ | chr12: | GGGGATGTAGCTCAGTGGTAGAGCGCATGC | 201 |
| sapiens_ | 124939966- | TTTGCACGTATGAGGCCCCGGGTTCAATCC | |
| tRNA- | 124940037 | CCGGCATCTCCA | |
| Ala- | (+) | | |
| TGC- | | | |
| 4- | | | |
| 1 | | | |
| Homo_ | chr6: | GGGGGTGTAGCTCAGTGGTAGAGCGCATGC | 202 |
| sapiens_ | 28817235- | TTTGCATGTATGAGGCCTCGGGTTCGATCC | |
| tRNA- | 28817306 | CCGACACCTCCA | |
| Ala- | (−) | | |
| TGC- | | | |
| 5- | | | |
| 1 | | | |
| Homo_ | chr6: | GGGGGTGTAGCTCAGTGGTAGAGCACATGC | 203 |
| sapiens_ | 28758364- | TTTGCATGTGTGAGGCCCCGGGTTCGATCC | |
| tRNA- | 28758435 | CCGGCACCTCCA | |
| Ala- | (−) | | |
| TGC- | | | |
| 6- | | | |
| 1 | | | |
| Homo_ | chr6: | GGGGGTGTAGCTCAGTGGTAGAGCGCATGC | 204 |
| sapiens_ | 28802800- | TTTGCATGTATGAGGCCTCGGTTCGATCCC | |
| tRNA- | 28802870 | CGACACCTCCA | |
| Ala- | (−) | | |
| TGC- | | | |
| 7- | | | |
| 1 | | | |
| Homo_ | chr6: | GGGCCAGTGGCGCAATGGATAACGCGTCTG | 205 |
| sapiens_ | 26328140- | ACTACGGATCAGAAGATTCCAGGTTCGACT | |
| tRNA- | 26328212 | CCTGGCTGGCTCG | |
| Arg- | (+) | | |
| ACG- | | | |
| 1- | | | |
| 1 | | | |
| Homo_ | chr6: | GGGCCAGTGGCGCAATGGATAACGCGTCTG | 206 |
| sapiens_ | 26537498- | ACTACGGATCAGAAGATTCCAGGTTCGACT | |
| tRNA- | 26537570 | CCTGGCTGGCTCG | |
| Arg- | (+) | | |
| ACG- | | | |
| 1- | | | |
| 2 | | | |
| Homo_ | chr14: | GGGCCAGTGGCGCAATGGATAACGCGTCTG | 207 |
| sapiens_ | 22929701- | ACTACGGATCAGAAGATTCCAGGTTCGACT | |
| tRNA- | 22929773 | CCTGGCTGGCTCG | |
| Arg- | (+) | | |
| ACG- | | | |
| 1- | | | |
| 3 | | | |
| Homo_ | chr3: | GGGCCAGTGGCGCAATGGATAACGCGTCTG | 208 |
| sapiens_ | 45688999- | ACTACGGATCAGAAGATTCTAGGTTCGACT | |
| tRNA- | 45689071 | CCTGGCTGGCTCG | |
| Arg- | (−) | | |
| ACG- | | | |
| 2- | | | |
| 1 | | | |
| Homo_ | chr6: | GGGCCAGTGGCGCAATGGATAACGCGTCTG | 209 |
| sapiens_ | 27213844- | ACTACGGATCAGAAGATTCTAGGTTCGACT | |
| tRNA- | 27213916 | CCTGGCTGGCTCG | |
| Arg- | (−) | | |
| ACG- | | | |
| 2- | | | |
| 2 | | | |
| Homo_ | chr6: | GGGCCAGTGGCGCAATGGATAACGCGTCTG | 210 |
| sapiens_ | 27215173- | ACTACGGATCAGAAGATTCTAGGTTCGACT | |
| tRNA- | 27215245 | CCTGGCTGGCTCG | |
| Arg- | (+) | | |
| ACG- | | | |
| 2- | | | |
| 3 | | | |
| Homo_ | chr6: | GGGCCAGTGGCGCAATGGATAACGCGTCTG | 211 |
| sapiens_ | 27670565- | ACTACGGATCAGAAGATTCTAGGTTCGACT | |
| tRNA- | 27670637 | CCTGGCTGGCTCG | |
| Arg- | (−) | | |
| ACG- | | | |
| 2- | | | |
| 4 | | | |
| Homo_ | chr6: | GGCCGCGTGGCCTAATGGATAAGGCGTCTG | 212 |
| sapiens_ | 28742952- | ATTCCGGATCAGAAGATTGAGGGTTCGAGT | |
| tRNA- | 28743024 | CCCTTCGTGGTCG | |
| Arg- | (−) | | |
| CCG- | | | |
| 1- | | | |
| 1 | | | |
| Homo_ | chr6: | GGCCGCGTGGCCTAATGGATAAGGCGTCTG | 213 |
| sapiens_ | 28881388- | ATTCCGGATCAGAAGATTGAGGGTTCGAGT | |
| tRNA- | 28881460 | CCCTTCGTGGTCG | |
| Arg- | (+) | | |
| CCG- | | | |
| 1- | | | |
| 2 | | | |
| Homo_ | chr16: | GGCCGCGTGGCCTAATGGATAAGGCGTCTG | 214 |
| sapiens_ | 3150674- | ATTCCGGATCAGAAGATTGAGGGTTCGAGT | |
| tRNA- | 3150746 | CCCTTCGTGGTCG | |
| Arg- | (+) | | |
| CCG- | | | |
| 1- | | | |
| 3 | | | |
| Homo_ | chr17: | GACCCAGTGGCCTAATGGATAAGGCATCAG | 215 |
| sapiens_ | 68019897- | CCTCCGGAGCTGGGGATTGTGGGTTCGAGT | |
| tRNA- | 68019969 | CCCATCTGGGTCG | |
| Arg- | (−) | | |
| CCG- | | | |
| 2- | | | |
| 1 | | | |
| Homo_ | chr17: | GCCCCAGTGGCCTAATGGATAAGGCACTGG | 216 |
| sapiens_ | 75033906- | CCTCCTAAGCCAGGGATTGTGGGTTCGAGT | |
| tRNA- | 75033978 | CCCACCTGGGGTA | |
| Arg- | (+) | | |
| CCT- | | | |
| 1- | | | |
| 1 | | | |
| Homo_ | chr17: | GCCCCAGTGGCCTAATGGATAAGGCACTGG | 217 |
| sapiens_ | 75034431- | CCTCCTAAGCCAGGGATTGTGGGTTCGAGT | |
| tRNA- | 75034503 | CCCACCTGGGGTG | |
| Arg- | (−) | | |
| CCT- | | | |
| 2- | | | |
| 1 | | | |
| Homo_ | chr16: | GCCCCGGTGGCCTAATGGATAAGGCATTGG | 218 |
| sapiens_ | 3152900- | CCTCCTAAGCCAGGGATTGTGGGTTCGAGT | |
| tRNA- | 3152972 | CCCACCCGGGGTA | |
| Arg- | (+) | | |
| CCT- | | | |
| 3- | | | |
| 1 | | | |
| Homo_ | chr7: | GCCCCAGTGGCCTAATGGATAAGGCATTGG | 219 |
| sapiens_ | 139340700- | CCTCCTAAGCCAGGGATTGTGGGTTCGAGT | |
| tRNA- | 139340772 | CCCATCTGGGGTG | |
| Arg- | (+) | | |
| CCT- | | | |
| 4- | | | |
| 1 | | | |
| Homo_ | chr16: | GCCCCAGTGGCCTGATGGATAAGGTACTGG | 220 |
| sapiens_ | 3193918- | CCTCCTAAGCCAGGGATTGTGGGTTCGAGT | |
| tRNA- | 3193990 | TCCACCTGGGGTA | |
| Arg- | (+) | | |
| CCT- | | | |
| 5- | | | |
| 1 | | | |
| Homo_ | chr15: | GGCCGCGTGGCCTAATGGATAAGGCGTCTG | 221 |
| sapiens_ | 89335073- | ACTTCGGATCAGAAGATTGCAGGTTCGAGT | |
| tRNA- | 89335145 | CCTGCCGCGGTCG | |
| Arg- | (+) | | |
| TCG- | | | |
| 1- | | | |
| 1 | | | |
| Homo_ | chr6: | GACCACGTGGCCTAATGGATAAGGCGTCTG | 222 |
| sapiens_ | 26322818- | ACTTCGGATCAGAAGATTGAGGGTTCGAAT | |
| tRNA- | 26322890 | CCCTCCGTGGTTA | |
| Arg- | (+) | | |
| TCG- | | | |
| 2- | | | |
| 1 | | | |
| Homo_ | chr17: | GACCGCGTGGCCTAATGGATAAGGCGTCTG | 223 |
| sapiens_ | 75035113- | ACTTCGGATCAGAAGATTGAGGGTTCGAGT | |
| tRNA- | 75035185 | CCCTTCGTGGTCG | |
| Arg- | (+) | | |
| TCG- | | | |
| 3- | | | |
| 1 | | | |
| Homo_ | chr6: | GACCACGTGGCCTAATGGATAAGGCGTCTG | 224 |
| sapiens_ | 26299677- | ACTTCGGATCAGAAGATTGAGGGTTCGAAT | |
| tRNA- | 26299749 | CCCTTCGTGGTTA | |
| Arg- | (+) | | |
| TCG- | | | |
| 4- | | | |
| 1 | | | |
| Homo_ | chr6: | GACCACGTGGCCTAATGGATAAGGCGTCTG | 225 |
| sapiens_ | 28543114- | ACTTCGGATCAGAAGATTGAGGGTTCGAAT | |
| tRNA- | 28543186 | CCCTTCGTGGTTG | |
| Arg- | (−) | | |
| TCG- | | | |
| 5- | | | |
| 1 | | | |
| Homo_ | chr9: | GGCCGTGTGGCCTAATGGATAAGGCGTCTG | 226 |
| sapiens_ | 110198523- | ACTTCGGATCAAAAGATTGCAGGTTTGAGT | |
| tRNA- | 110198595 | TCTGCCACGGTCG | |
| Arg- | (+) | | |
| TCG- | | | |
| 6- | | | |
| 1 | | | |
| Homo_ | chr1: | GGCTCCGTGGCGCAATGGATAGCGCATTGG | 227 |
| sapiens_ | 93847573- | ACTTCTAGAGGCTGAAGGCATTCAAAGGTT | |
| tRNA- | 93847657 | CCGGGTTCGAGTCCCGGCGGAGTCG | |
| Arg- | (+) | | |
| TCT- | | | |
| 1- | | | |
| 1 | | | |
| Homo_ | chr17: | GGCTCTGTGGCGCAATGGATAGCGCATTGG | 228 |
| sapiens_ | 8120925- | ACTTCTAGTGACGAATAGAGCAATTCAAAG | |
| tRNA- | 8121012 | GTTGTGGGTTCGAATCCCACCAGAGTCG | |
| Arg- | (+) | | |
| TCT- | | | |
| 2- | | | |
| 1 | | | |
| Homo_ | chr9: | GGCTCTGTGGCGCAATGGATAGCGCATTGG | 229 |
| sapiens_ | 128340076- | ACTTCTAGCTGAGCCTAGTGTGGTCATTCA | |
| tRNA- | 128340166 | AAGGTTGTGGGTTCGAGTCCCACCAGAGTC | |
| Arg- | (−) | G | |
| TCT- | | | |
| 3- | | | |
| 1 | | | |
| Homo_ | chr11: | GGCTCTGTGGCGCAATGGATAGCGCATTGG | 230 |
| sapiens_ | 59551294- | ACTTCTAGATAGTTAGAGAAATTCAAAGGT | |
| tRNA- | 59551379 | TGTGGGTTCGAGTCCCACCAGAGTCG | |
| Arg- | (+) | | |
| TCT- | | | |
| 3- | | | |
| 2 | | | |
| Homo_ | chr1: | GTCTCTGTGGCGCAATGGACGAGCGCGCTG | 231 |
| sapiens_ | 159141611- | GACTTCTAATCCAGAGGTTCCGGGTTCGAG | |
| tRNA- | 159141684 | TCCCGGCAGAGATG | |
| Arg- | (−) | | |
| TCT- | | | |
| 4- | | | |
| 1 | | | |
| Homo_ | chr6: | GGCTCTGTGGCGCAATGGATAGCGCATTGG | 232 |
| sapiens_ | 27562184- | ACTTCTAGCCTAAATCAAGAGATTCAAAGG | |
| tRNA- | 27562270 | TTGCGGGTTCGAGTCCCTCCAGAGTCG | |
| Arg- | (+) | | |
| TCT- | | | |
| 5- | | | |
| 1 | | | |
| Homo_ | chr1: | GTCTCTGTGGCGCAATCGGTTAGCGCGTTC | 233 |
| sapiens_ | 161540241- | GGCTGTTAACCGAAAGGTTGGTGGTTCGAT | |
| tRNA- | 161540314 | CCCACCCAGGGACG | |
| Asn- | (+) | | |
| GTT- | | | |
| 1- | | | |
| 1 | | | |
| Homo_ | chr1: | GTCTCTGTGGCGCAATCGGCTAGCGCGTTT | 234 |
| sapiens_ | 145129239- | GGCTGTTAACTAAAAGGTTGGCGGTTCGAA | |
| tRNA- | 145129312 | CCCACCCAGAGGCG | |
| Asn- | (+) | | |
| GTT- | | | |
| 10- | | | |
| 1 | | | |
| Homo_ | chr1: | GTCTCTGTGGTGCAATCGGTTAGCGCGTTC | 235 |
| sapiens_ | 120952291- | CGCTGTTAACCGAAAGCTTGGTGGTTCGAG | |
| tRNA- | 120952364 | CCCACCCAGGGATG | |
| Asn- | (−) | | |
| GTT- | | | |
| 11- | | | |
| 1 | | | |
| Homo_ | chr1: | GTCTCTGTGGTGCAATCGGTTAGCGCGTTC | 236 |
| sapiens_ | 149646451- | CGCTGTTAACCGAAAGCTTGGTGGTTCGAG | |
| tRNA- | 149646524 | CCCACCCAGGGATG | |
| Asn- | (−) | | |
| GTT- | | | |
| 11- | | | |
| 2 | | | |
| Homo_ | chr1: | GTCTCTGTGGCGCAATCGGCTAGCGCGTTT | 237 |
| sapiens_ | 143831708- | GGCTGTTAACTAAAAAGTTGGTGGTTCGAA | |
| tRNA- | 143831781 | CACACCCAGAGGCG | |
| Asn- | (−) | | |
| GTT- | | | |
| 12- | | | |
| 1 | | | |
| Homo_ | chr1: | GTCTCTGTGGCGCAATCGGTTAGCGCGTTC | 238 |
| sapiens_ | 148529257- | GGCTGTTAACCGAAAGGTTGGTGGTTCGAG | |
| tRNA- | 148529330 | CCCACCCAGGGACG | |
| Asn- | (+) | | |
| GTT- | | | |
| 2- | | | |
| 1 | | | |
| Homo_ | chr1: | GTCTCTGTGGCGCAATCGGTTAGCGCGTTC | 239 |
| sapiens_ | 161428077- | GGCTGTTAACCGAAAGGTTGGTGGTTCGAG | |
| tRNA- | 161428150 | CCCACCCAGGGACG | |
| Asn- | (−) | | |
| GTT- | | | |
| 2- | | | |
| 2 | | | |
| Homo_ | chr10: | GTCTCTGTGGCGCAATCGGTTAGCGCGTTC | 240 |
| sapiens_ | 22229509- | GGCTGTTAACCGAAAGGTTGGTGGTTCGAG | |
| tRNA- | 22229582 | CCCACCCAGGGACG | |
| Asn- | (−) | | |
| GTT- | | | |
| 2- | | | |
| 3 | | | |
| Homo_ | chr13: | GTCTCTGTGGCGCAATCGGTTAGCGCGTTC | 241 |
| sapiens_ | 30673964- | GGCTGTTAACCGAAAGGTTGGTGGTTCGAG | |
| tRNA- | 30674037 | CCCACCCAGGGACG | |
| Asn- | (−) | | |
| GTT- | | | |
| 2- | | | |
| 4 | | | |
| Homo_ | chr17: | GTCTCTGTGGCGCAATCGGTTAGCGCGTTC | 242 |
| sapiens_ | 38751781- | GGCTGTTAACCGAAAGGTTGGTGGTTCGAG | |
| tRNA- | 38751854 | CCCACCCAGGGACG | |
| Asn- | (−) | | |
| GTT- | | | |
| 2- | | | |
| 5 | | | |
| Homo_ | chr19: | GTCTCTGTGGCGCAATCGGTTAGCGCGTTC | 243 |
| sapiens_ | 1383563- | GGCTGTTAACCGAAAGGTTGGTGGTTCGAG | |
| tRNA- | 1383636 | CCCACCCAGGGACG | |
| Asn- | (+) | | |
| GTT- | | | |
| 2- | | | |
| 6 | | | |
| Homo_ | chr1: | GTCTCTGTGGCGCAATCGGTTAGCGCGTTC | 244 |
| sapiens_ | 145287766- | GGCTGTTAACCGAAAGGTTGGTGGTTCGAG | |
| tRNA- | 145287839 | CCCACCCAGGGACG | |
| Asn- | (+) | | |
| GTT- | | | |
| 2- | | | |
| 7 | | | |
| Homo_ | chr1: | GTCTCTGTGGCGCAATCGGTTAGCGCGTTC | 245 |
| sapiens_ | 144567515- | GGCTGTTAACCGAAAGGTTGGTGGTTCGAG | |
| tRNA- | 144567588 | CCCACCCAGGGACG | |
| Asn- | (−) | | |
| GTT- | | | |
| 2- | | | |
| 8 | | | |
| Homo_ | chr1: | GTCTCTGTGGCGCAATCGGTTAGCGCGTTC | 246 |
| sapiens_ | 146370101- | GGCTGTTAACCGCAAGGTTGGTGGTTCCAG | |
| tRNA- | 146370174 | CCCACCCAGGGACG | |
| Asn- | (+) | | |
| GTT- | | | |
| 24- | | | |
| 1 | | | |
| Homo_ | chr1: | GTCTCTGTGGCGCAATTGGTTAGCGCGTTC | 247 |
| sapiens_ | 149558419- | GGTTGTTAACCGTAAAGGTTGGTGGTTCGA | |
| tRNA- | 149558493 | GCCCACCCAGGAACG | |
| Asn- | (−) | | |
| GTT- | | | |
| 25- | | | |
| 1 | | | |
| Homo_ | chr1: | GTCTCTGTGGCGCAATCGGCTAGCGCTTTT | 248 |
| sapiens_ | 121048432- | GGCTGTTAACTAAAAGGTTGGTGGTTTGAA | |
| tRNA- | 121048505 | CCCACCCAGAGGCG | |
| Asn- | (−) | | |
| GTT- | | | |
| 27- | | | |
| 1 | | | |
| Homo_ | chr1: | GTCTCTGTGGCGCAATCGGTTAGCGCATTC | 249 |
| sapiens_ | 144419267- | GGCTGTTAACCGAAAGGTTGGTGGTTCGAG | |
| tRNA- | 144419340 | CCCACCCAGGGACG | |
| Asn- | (+) | | |
| GTT- | | | |
| 3- | | | |
| 1 | | | |
| Homo_ | chr1: | GTCTCTGTGGCGCAATCGGTTAGCGCGTTC | 250 |
| sapiens_ | 16889677- | GGCTGTTAACCGAAAGATTGGTGGTTCGAG | |
| tRNA- | 16889750 | CCCACCCAGGGACG | |
| Asn- | (+) | | |
| GTT- | | | |
| 4- | | | |
| 1 | | | |
| Homo_ | chr1: | GTCTCTGTGGCGCAATCGGTTAGCGCGTTC | 251 |
| sapiens_ | 16520585- | GGCTGTTAACTGAAAGGTTGGTGGTTCGAG | |
| tRNA- | 16520658 | CCCACCCAGGGACG | |
| Asn- | (−) | | |
| GTT- | | | |
| 5- | | | |
| 1 | | | |
| Homo_ | chr1: | GTCTCTGTGGCGCAATGGGTTAGCGCGTTC | 252 |
| sapiens_ | 143735920- | GGCTGTTAACCGAAAGGTTGGTGGTTCGAG | |
| tRNA- | 143735993 | CCCATCCAGGGACG | |
| Asn- | (−) | | |
| GTT- | | | |
| 6- | | | |
| 1 | | | |
| Homo_ | chr1: | GTCTCTGTGGCGTAGTCGGTTAGCGCGTTC | 253 |
| sapiens_ | 120844262- | GGCTGTTAACCGAAAGGTTGGTGGTTCGAG | |
| tRNA- | 120844335 | CCCACCCAGGAACG | |
| Asn- | (−) | | |
| GTT- | | | |
| 7- | | | |
| 1 | | | |
| Homo_ | chr1: | GTCTCTGTGGCGCAATCGGCTAGCGCGTTT | 254 |
| sapiens_ | 149740248- | GGCTGTTAACTAAAAGGTTGGTGGTTCGAA | |
| tRNA- | 149740321 | CCCACCCAGAGGCG | |
| Asn- | (−) | | |
| GTT- | | | |
| 8- | | | |
| 1 | | | |
| Homo_ | chr1: | GTCTCTGTGGCGCAATCGGTTAGCGCGTTC | 255 |
| sapiens_ | 145475381- | GGCTGTTAACTGAAAGGTTGGTGGTTCGAG | |
| tRNA- | 145475454 | CCCACCCGGGGACG | |
| Asn- | (−) | | |
| GTT- | | | |
| 9- | | | |
| 1 | | | |
| Homo_ | chr1: | GTCTCTGTGGCGCAATCGGTTAGCGCGTTC | 256 |
| sapiens_ | 148048516- | GGCTGTTAACTGAAAGGTTAGTGGTTCGAG | |
| tRNA- | 148048589 | CCCACCCGGGGACG | |
| Asn- | (−) | | |
| GTT- | | | |
| 9- | | | |
| 2 | | | |
| Homo_ | chr12: | TCCTCGTTAGTATAGTGGTTAGTATCCCCG | 257 |
| sapiens_ | 98503503- | CCTGTCACGCGGGAGACCGGGGTTCAATTC | |
| tRNA- | 98503574 | CCCGACGGGGAG | |
| Asp- | (+) | | |
| GTC- | | | |
| 1- | | | |
| 1 | | | |
| Homo_ | chr1: | TCCTCGTTAGTATAGTGGTGAGTATCCCCG | 258 |
| sapiens_ | 161440825- | CCTGTCACGCGGGAGACCGGGGTTCGATTC | |
| tRNA- | 161440896 | CCCGACGGGGAG | |
| Asp- | (−) | | |
| GTC- | | | |
| 2- | | | |
| 1 | | | |
| Homo_ | chr12: | TCCTCGTTAGTATAGTGGTGAGTATCCCCG | 259 |
| sapiens_ | 124939647- | CCTGTCACGCGGGAGACCGGGGTTCGATTC | |
| tRNA- | 124939718 | CCCGACGGGGAG | |
| Asp- | (−) | | |
| GTC- | | | |
| 2- | | | |
| 10 | | | |
| Homo_ | chr17: | TCCTCGTTAGTATAGTGGTGAGTATCCCCG | 260 |
| sapiens_ | 8222238- | CCTGTCACGCGGGAGACCGGGGTTCGATTC | |
| tRNA- | 8222309 | CCCGACGGGGAG | |
| Asp- | (−) | | |
| GTC- | | | |
| 2- | | | |
| 11 | | | |
| Homo_ | chr1: | TCCTCGTTAGTATAGTGGTGAGTATCCCCG | 261 |
| sapiens_ | 161448243- | CCTGTCACGCGGGAGACCGGGGTTCGATTC | |
| tRNA- | 161448314 | CCCGACGGGGAG | |
| Asp- | (−) | | |
| GTC- | | | |
| 2- | | | |
| 2 | | | |
| Homo_ | chr1: | TCCTCGTTAGTATAGTGGTGAGTATCCCCG | 262 |
| sapiens_ | 161455624- | CCTGTCACGCGGGAGACCGGGGTTCGATTC | |
| tRNA- | 161455695 | CCCGACGGGGAG | |
| Asp- | (−) | | |
| GTC- | | | |
| 2- | | | |
| 3 | | | |
| Homo_ | chr1: | TCCTCGTTAGTATAGTGGTGAGTATCCCCG | 263 |
| sapiens_ | 161463034- | CCTGTCACGCGGGAGACCGGGGTTCGATTC | |
| tRNA- | 161463105 | CCCGACGGGGAG | |
| Asp- | (−) | | |
| GTC- | | | |
| 2- | | | |
| 4 | | | |
| Homo_ | chr1: | TCCTCGTTAGTATAGTGGTGAGTATCCCCG | 264 |
| sapiens_ | 161470415- | CCTGTCACGCGGGAGACCGGGGTTCGATTC | |
| tRNA- | 161470486 | CCCGACGGGGAG | |
| Asp- | (−) | | |
| GTC- | | | |
| 2- | | | |
| 5 | | | |
| Homo_ | chr6: | TCCTCGTTAGTATAGTGGTGAGTATCCCCG | 265 |
| sapiens_ | 27479674- | CCTGTCACGCGGGAGACCGGGGTTCGATTC | |
| tRNA- | 27479745 | CCCGACGGGGAG | |
| Asp- | (+) | | |
| GTC- | | | |
| 2- | | | |
| 6 | | | |
| Homo_ | chr6: | TCCTCGTTAGTATAGTGGTGAGTATCCCCG | 266 |
| sapiens_ | 27503744- | CCTGTCACGCGGGAGACCGGGGTTCGATTC | |
| tRNA- | 27503815 | CCCGACGGGGAG | |
| Asp- | (+) | | |
| GTC- | | | |
| 2- | | | |
| 7 | | | |
| Homo_ | chr12: | TCCTCGTTAGTATAGTGGTGAGTATCCCCG | 267 |
| sapiens_ | 96036021- | CCTGTCACGCGGGAGACCGGGGTTCGATTC | |
| tRNA- | 96036092 | CCCGACGGGGAG | |
| Asp- | (+) | | |
| GTC- | | | |
| 2- | | | |
| 8 | | | |
| Homo_ | chr12: | TCCTCGTTAGTATAGTGGTGAGTATCCCCG | 268 |
| sapiens_ | 124927345- | CCTGTCACGCGGGAGACCGGGGTTCGATTC | |
| tRNA- | 124927416 | CCCGACGGGGAG | |
| Asp- | (−) | | |
| GTC- | | | |
| 2- | | | |
| 9 | | | |
| Homo_ | chr6: | TCCTCGTTAGTATAGTGGTGAGTGTCCCCG | 269 |
| sapiens_ | 27583457- | TCTGTCACGCGGGAGACCGGGGTTCGATTC | |
| tRNA- | 27583528 | CCCGACGGGGAG | |
| Asp- | (−) | | |
| GTC- | | | |
| 3- | | | |
| 1 | | | |
| Homo_ | chr7: | GGGGGCATAGCTCAGTGGTAGAGCATTTGA | 270 |
| sapiens_ | 149310190- | CTGCAGATCAAGAGGTCCCTGGTTCAAATC | |
| tRNA- | 149310261 | CAGGTGCCCCCT | |
| Cys- | (+) | | |
| GCA- | | | |
| 1- | | | |
| 1 | | | |
| Homo_ | chr7: | GGGGGTATAGCTCAGGGGTAGAGCATTTGA | 271 |
| sapiens_ | 149377510- | CTGCAGATCAAGAGGTCCCTGGTTCAAATC | |
| tRNA- | 149377581 | CAGGTGCCCCCC | |
| Cys- | (−) | | |
| GCA- | | | |
| 10- | | | |
| 1 | | | |
| Homo_ | chr7: | GGGGGTATAGCTTAGCGGTAGAGCATTTGA | 272 |
| sapiens_ | 149415138- | CTGCAGATCAAGAGGTCCCCGGTTCAAATC | |
| tRNA- | 149415209 | CGGGTGCCCCCT | |
| Cys- | (−) | | |
| GCA- | | | |
| 11- | | | |
| 1 | | | |
| Homo_ | chr7: | GGGGGTATAGCTTAGGGGTAGAGCATTTGA | 273 |
| sapiens_ | 149646955- | CTGCAGATCAAAAGGTCCCTGGTTCAAATC | |
| tRNA- | 149647026 | CAGGTGCCCCTT | |
| Cys- | (−) | | |
| GCA- | | | |
| 12- | | | |
| 1 | | | |
| Homo_ | chr7: | GGGGGTATAGCTCAGGGGTAGAGCATTTGA | 274 |
| sapiens_ | 149355675- | CTGCAGATCAAGAGGTCCCCAGTTCAAATC | |
| tRNA- | 149355746 | TGGGTGCCCCCT | |
| Cys- | (−) | | |
| GCA- | | | |
| 13- | | | |
| 1 | | | |
| Homo_ | chr17: | GGGGGTATAGCTCAGGGGTAGAGCATTTGA | 275 |
| sapiens_ | 38861684- | CTGCAGATCAAGAAGTCCCCGGTTCAAATC | |
| tRNA- | 38861755 | CGGGTGCCCCCT | |
| Cys- | (−) | | |
| GCA- | | | |
| 14- | | | |
| 1 | | | |
| Homo_ | chr7: | GGGGGTATAGCTCAGGGGTAGAGCATTTGA | 276 |
| sapiens_ | 149584725- | CTGCAGATCAAGAGGTCTCTGGTTCAAATC | |
| tRNA- | 149584796 | CAGGTGCCCCCT | |
| Cys- | (+) | | |
| GCA- | | | |
| 15- | | | |
| 1 | | | |
| Homo_ | chr7: | GGGGGTATAGCTCAGGGGTAGAGCACTTGA | 277 |
| sapiens_ | 149546540- | CTGCAGATCAAGAAGTCCTTGGTTCAAATC | |
| tRNA- | 149546611 | CAGGTGCCCCCT | |
| Cys- | (+) | | |
| GCA- | | | |
| 16- | | | |
| 1 | | | |
| Homo_ | chr7: | GGGGATATAGCTCAGGGGTAGAGCATTTGA | 278 |
| sapiens_ | 149691181- | CTGCAGATCAAGAGGTCCCCGGTTCAAATC | |
| tRNA- | 149691252 | CGGGTGCCCCCC | |
| Cys- | (−) | | |
| GCA- | | | |
| 17- | | | |
| 1 | | | |
| Homo_ | chr7: | GGGGGTATAGTTCAGGGGTAGAGCATTTGA | 279 |
| sapiens_ | 149375759- | CTGCAGATCAAGAGGTCCCTGGTTCAAATC | |
| tRNA- | 149375830 | CAGGTGCCCCCT | |
| Cys- | (−) | | |
| GCA- | | | |
| 18- | | | |
| 1 | | | |
| Homo_ | chr7: | GGGGGTATAGCTCAGGGGTAGAGCATTTGA | 280 |
| sapiens_ | 149613065- | CTGCAAATCAAGAGGTCCCTGATTCAAATC | |
| tRNA- | 149613136 | CAGGTGCCCCCT | |
| Cys- | (−) | | |
| GCA- | | | |
| 19- | | | |
| 1 | | | |
| Homo_ | chr4: | GGGGGTATAGCTCAGTGGTAGAGCATTTGA | 281 |
| sapiens_ | 123508850- | CTGCAGATCAAGAGGTCCCCGGTTCAAATC | |
| tRNA- | 123508921 | CGGGTGCCCCCT | |
| Cys- | (−) | | |
| GCA- | | | |
| 2- | | | |
| 1 | | | |
| Homo_ | chr17: | GGGGGTATAGCTCAGTGGTAGAGCATTTGA | 282 |
| sapiens_ | 38867645- | CTGCAGATCAAGAGGTCCCCGGTTCAAATC | |
| tRNA- | 38867716 | CGGGTGCCCCCT | |
| Cys- | (+) | | |
| GCA- | | | |
| 2- | | | |
| 2 | | | |
| Homo_ | chr17: | GGGGGTATAGCTCAGTGGTAGAGCATTTGA | 283 |
| sapiens_ | 39153734- | CTGCAGATCAAGAGGTCCCCGGTTCAAATC | |
| tRNA- | 39153805 | CGGGTGCCCCCT | |
| Cys- | (−) | | |
| GCA- | | | |
| 2- | | | |
| 3 | | | |
| Homo_ | chr17: | GGGGGTATAGCTCAGTGGTAGAGCATTTGA | 284 |
| sapiens_ | 39154491- | CTGCAGATCAAGAGGTCCCCGGTTCAAATC | |
| tRNA- | 39154562 | CGGGTGCCCCCT | |
| Cys- | (−) | | |
| GCA- | | | |
| 2- | | | |
| 4 | | | |
| Homo_ | chr7: | GGGCGTATAGCTCAGGGGTAGAGCATTTGA | 285 |
| sapiens_ | 149597955- | CTGCAGATCAAGAGGTCCCCAGTTCAAATC | |
| tRNA- | 149598026 | TGGGTGCCCCCT | |
| Cys- | (+) | | |
| GCA- | | | |
| 20- | | | |
| 1 | | | |
| Homo_ | chr7: | GGGGGTATAGCTCACAGGTAGAGCATTTGA | 286 |
| sapiens_ | 149664824- | CTGCAGATCAAGAGGTCCCCGGTTCAAATC | |
| tRNA- | 149664895 | TGGGTGCCCCCT | |
| Cys- | (+) | | |
| GCA- | | | |
| 21- | | | |
| 1 | | | |
| Homo_ | chr7: | GGGCGTATAGCTCAGGGGTAGAGCATTTGA | 287 |
| sapiens_ | 149556711- | CTGCAGATCAAGAGGTCCCCAGTTCAAATC | |
| tRNA- | 149556780 | TGGGTGCCCA | |
| Cys- | (+) | | |
| GCA- | | | |
| 22- | | | |
| 1 | | | |
| Homo_ | chr7: | GGGGGTATAGCTCACAGGTAGAGCATTTGA | 288 |
| sapiens_ | 149595214- | CTGCAGATCAAGAGGTCCCCGGTTCAAATC | |
| tRNA- | 149595285 | CGGTTACTCCCT | |
| Cys- | (−) | | |
| GCA- | | | |
| 23- | | | |
| 1 | | | |
| Homo_ | chr7: | GGGGGTATAGCTCAGGGGTAGAGCACTTGA | 289 |
| sapiens_ | 149589073- | CTGCAGATCAAGAGGTCCCTGGTTCAAATC | |
| tRNA- | 149589144 | CAGGTGCCCCCT | |
| Cys- | (−) | | |
| GCA- | | | |
| 3- | | | |
| 1 | | | |
| Homo_ | chr17: | GGGGGTATAGCTCAGTGGTAGAGCATTTGA | 290 |
| sapiens_ | 38869292- | CTGCAGATCAAGAGGTCCCTGGTTCAAATC | |
| tRNA- | 38869363 | CGGGTGCCCCCT | |
| Cys- | (−) | | |
| GCA- | | | |
| 4- | | | |
| 1 | | | |
| Homo_ | chr15: | GGGGGTATAGCTCAGTGGGTAGAGCATTTG | 291 |
| sapiens_ | 79744655- | ACTGCAGATCAAGAGGTCCCCGGTTCAAAT | |
| tRNA- | 79744727 | CCGGGTGCCCCCT | |
| Cys- | (+) | | |
| GCA- | | | |
| 5- | | | |
| 1 | | | |
| Homo_ | chr3: | GGGGGTGTAGCTCAGTGGTAGAGCATTTGA | 292 |
| sapiens_ | 132229100- | CTGCAGATCAAGAGGTCCCTGGTTCAAATC | |
| tRNA- | 132229171 | CAGGTGCCCCCT | |
| Cys- | (−) | | |
| GCA- | | | |
| 6- | | | |
| 1 | | | |
| Homo_ | chr1: | GGGGGTATAGCTCAGGTGGTAGAGCATTTG | 293 |
| sapiens_ | 93516277- | ACTGCAGATCAAGAGGTCCCCGGTTCAAAT | |
| tRNA- | 93516349 | CCGGGTGCCCCCT | |
| Cys- | (−) | | |
| GCA- | | | |
| 7- | | | |
| 1 | | | |
| Homo_ | chr14: | GGGGGTATAGCTCAGGGGTAGAGCATTTGA | 294 |
| sapiens_ | 72962971- | CTGCAGATCAAGAGGTCCCCGGTTCAAATC | |
| tRNA- | 72963042 | CGGGTGCCCCCT | |
| Cys- | (+) | | |
| GCA- | | | |
| 8- | | | |
| 1 | | | |
| Homo_ | chr3: | GGGGGTATAGCTCAGGGGTAGAGCATTTGA | 295 |
| sapiens_ | 132231798- | CTGCAGATCAAGAGGTCCCTGGTTCAAATC | |
| tRNA- | 132231869 | CAGGTGCCCCCT | |
| Cys- | (−) | | |
| GCA- | | | |
| 9- | | | |
| 1 | | | |
| Homo_ | chr7: | GGGGGTATAGCTCAGGGGTAGAGCATTTGA | 296 |
| sapiens_ | 149331129- | CTGCAGATCAAGAGGTCCCTGGTTCAAATC | |
| tRNA- | 149331200 | CAGGTGCCCCCT | |
| Cys- | (+) | | |
| GCA- | | | |
| 9- | | | |
| 2 | | | |
| Homo_ | chr7: | GGGGGTATAGCTCAGGGGTAGAGCATTTGA | 297 |
| sapiens_ | 149635687- | CTGCAGATCAAGAGGTCCCTGGTTCAAATC | |
| tRNA- | 149635758 | CAGGTGCCCCCT | |
| Cys- | (+) | | |
| GCA- | | | |
| 9- | | | |
| 3 | | | |
| Homo_ | chr7: | GGGGGTATAGCTCAGGGGTAGAGCATTTGA | 298 |
| sapiens_ | 149707669- | CTGCAGATCAAGAGGTCCCTGGTTCAAATC | |
| tRNA- | 149707740 | CAGGTGCCCCCT | |
| Cys- | (+) | | |
| GCA- | | | |
| 9- | | | |
| 4 | | | |
| Homo_ | chr6: | GGTTCCATGGTGTAATGGTTAGCACTCTGG | 299 |
| sapiens_ | 18836171- | ACTCTGAATCCAGCGATCCGAGTTCAAATC | |
| tRNA- | 18836242 | TCGGTGGAACCT | |
| Gln- | (+) | | |
| CTG- | | | |
| 1- | | | |
| 1 | | | |
| Homo_ | chr6: | GGTTCCATGGTGTAATGGTTAGCACTCTGG | 300 |
| sapiens_ | 27519529- | ACTCTGAATCCAGCGATCCGAGTTCAAATC | |
| tRNA- | 27519600 | TCGGTGGAACCT | |
| Gln- | (+) | | |
| CTG- | | | |
| 1- | | | |
| 2 | | | |
| Homo_ | chr6: | GGTTCCATGGTGTAATGGTTAGCACTCTGG | 301 |
| sapiens_ | 28941601- | ACTCTGAATCCAGCGATCCGAGTTCAAATC | |
| tRNA- | 28941672 | TCGGTGGAACCT | |
| Gln- | (−) | | |
| CTG- | | | |
| 1- | | | |
| 3 | | | |
| Homo_ | chr15: | GGTTCCATGGTGTAATGGTTAGCACTCTGG | 302 |
| sapiens_ | 65869062- | ACTCTGAATCCAGCGATCCGAGTTCAAATC | |
| tRNA- | 65869133 | TCGGTGGAACCT | |
| Gln- | (−) | | |
| CTG- | | | |
| 1- | | | |
| 4 | | | |
| Homo_ | chr17: | GGTTCCATGGTGTAATGGTTAGCACTCTGG | 303 |
| sapiens_ | 8119752- | ACTCTGAATCCAGCGATCCGAGTTCAAATC | |
| tRNA- | 8119823 | TCGGTGGAACCT | |
| Gln- | (+) | | |
| CTG- | | | |
| 1- | | | |
| 5 | | | |
| Homo_ | chr6: | GGTTCCATGGTGTAATGGTTAGCACTCTGG | 304 |
| sapiens_ | 27547752- | ACTCTGAATCCAGCGATCCGAGTTCAAGTC | |
| tRNA- | 27547823 | TCGGTGGAACCT | |
| Gln- | (−) | | |
| CTG- | | | |
| 2- | | | |
| 1 | | | |
| Homo_ | chr1: | GGTTCCATGGTGTAATGGTGAGCACTCTGG | 305 |
| sapiens_ | 145459658- | ACTCTGAATCCAGCGATCCGAGTTCGAGTC | |
| tRNA- | 145459729 | TCGGTGGAACCT | |
| Gln- | (+) | | |
| CTG- | | | |
| 3- | | | |
| 1 | | | |
| Homo_ | chr1: | GGTTCCATGGTGTAATGGTGAGCACTCTGG | 306 |
| sapiens_ | 148032790- | ACTCTGAATCCAGCGATCCGAGTTCGAGTC | |
| tRNA- | 148032861 | TCGGTGGAACCT | |
| Gln- | (+) | | |
| CTG- | | | |
| 3- | | | |
| 2 | | | |
| Homo_ | chr1: | GGTTCCATGGTGTAATGGTAAGCACTCTGG | 307 |
| sapiens_ | 148265108- | ACTCTGAATCCAGCGATCCGAGTTCGAGTC | |
| tRNA- | 148265179 | TCGGTGGAACCT | |
| Gln- | (−) | | |
| CTG- | | | |
| 4- | | | |
| 1 | | | |
| Homo_ | chr1: | GGTTCCATGGTGTAATGGTAAGCACTCTGG | 308 |
| sapiens_ | 143691474- | ACTCTGAATCCAGCGATCCGAGTTCGAGTC | |
| tRNA- | 143691545 | TCGGTGGAACCT | |
| Gln- | (+) | | |
| CTG- | | | |
| 4- | | | |
| 2 | | | |
| Homo_ | chr6: | GGTTCCATGGTGTAATGGTTAGCACTCTGG | 309 |
| sapiens_ | 27295433- | ACTCTGAATCCGGTAATCCGAGTTCAAATC | |
| tRNA- | 27295504 | TCGGTGGAACCT | |
| Gln- | (+) | | |
| CTG- | | | |
| 5- | | | |
| 1 | | | |
| Homo_ | chr6: | GGCCCCATGGTGTAATGGTCAGCACTCTGG | 310 |
| sapiens_ | 27791356- | ACTCTGAATCCAGCGATCCGAGTTCAAATC | |
| tRNA- | 27791427 | TCGGTGGGACCC | |
| Gln- | (−) | | |
| CTG- | | | |
| 6- | | | |
| 1 | | | |
| Homo_ | chr1: | GGTTCCATGGTGTAATGGTAAGCACTCTGG | 311 |
| sapiens_ | 148328812- | ACTCTGAATCCAGCCATCTGAGTTCGAGTC | |
| tRNA- | 148328883 | TCTGTGGAACCT | |
| Gln- | (+) | | |
| CTG- | | | |
| 7- | | | |
| 1 | | | |
| Homo_ | chr17: | GGTCCCATGGTGTAATGGTTAGCACTCTGG | 312 |
| sapiens_ | 49192528- | ACTTTGAATCCAGCGATCCGAGTTCAAATC | |
| tRNA- | 49192599 | TCGGTGGGACCT | |
| Gln- | (+) | | |
| TTG- | | | |
| 1- | | | |
| 1 | | | |
| Homo_ | chr6: | GGTCCCATGGTGTAATGGTTAGCACTCTGG | 313 |
| sapiens_ | 28589379- | ACTTTGAATCCAGCAATCCGAGTTCGAATC | |
| tRNA- | 28589450 | TCGGTGGGACCT | |
| Gln- | (+) | | |
| TTG- | | | |
| 2- | | | |
| 1 | | | |
| Homo_ | chr6: | GGCCCCATGGTGTAATGGTTAGCACTCTGG | 314 |
| sapiens_ | 26311196- | ACTTTGAATCCAGCGATCCGAGTTCAAATC | |
| tRNA- | 26311267 | TCGGTGGGACCT | |
| Gln- | (−) | | |
| TTG- | | | |
| 3- | | | |
| 1 | | | |
| Homo_ | chr6: | GGCCCCATGGTGTAATGGTTAGCACTCTGG | 315 |
| sapiens_ | 26311747- | ACTTTGAATCCAGCGATCCGAGTTCAAATC | |
| tRNA- | 26311818 | TCGGTGGGACCT | |
| Gln- | (−) | | |
| TTG- | | | |
| 3- | | | |
| 2 | | | |
| Homo_ | chr6: | GGCCCCATGGTGTAATGGTTAGCACTCTGG | 316 |
| sapiens_ | 27795861- | ACTTTGAATCCAGCGATCCGAGTTCAAATC | |
| tRNA- | 27795932 | TCGGTGGGACCT | |
| Gln- | (−) | | |
| TTG- | | | |
| 3- | | | |
| 3 | | | |
| Homo_ | chr6: | GGTCCCATGGTGTAATGGTTAGCACTCTGG | 317 |
| sapiens_ | 145182723- | GCTTTGAATCCAGCAATCCGAGTTCGAATC | |
| tRNA- | 145182794 | TTGGTGGGACCT | |
| Gln- | (+) | | |
| TTG- | | | |
| 4- | | | |
| 1 | | | |
| Homo_ | chr1: | TCCCTGGTGGTCTAGTGGTTAGGATTCGGC | 318 |
| sapiens_ | 146035692- | GCTCTCACCGCCGCGGCCCGGGTTCGATTC | |
| tRNA- | 146035763 | CCGGTCAGGGAA | |
| Glu- | (+) | | |
| CTC- | | | |
| 1- | | | |
| 1 | | | |
| Homo_ | chr1: | TCCCTGGTGGTCTAGTGGTTAGGATTCGGC | 319 |
| sapiens_ | 161447228- | GCTCTCACCGCCGCGGCCCGGGTTCGATTC | |
| tRNA- | 161447299 | CCGGTCAGGGAA | |
| Glu- | (−) | | |
| CTC- | | | |
| 1- | | | |
| 2 | | | |
| Homo_ | chr1: | TCCCTGGTGGTCTAGTGGTTAGGATTCGGC | 320 |
| sapiens_ | 161454608- | GCTCTCACCGCCGCGGCCCGGGTTCGATTC | |
| tRNA- | 161454679 | CCGGTCAGGGAA | |
| Glu- | (−) | | |
| CTC- | | | |
| 1- | | | |
| 3 | | | |
| Homo_ | chr1: | TCCCTGGTGGTCTAGTGGTTAGGATTCGGC | 321 |
| sapiens_ | 161462019- | GCTCTCACCGCCGCGGCCCGGGTTCGATTC | |
| tRNA- | 161462090 | CCGGTCAGGGAA | |
| Glu- | (−) | | |
| CTC- | | | |
| 1- | | | |
| 4 | | | |
| Homo_ | chr1: | TCCCTGGTGGTCTAGTGGTTAGGATTCGGC | 322 |
| sapiens_ | 161469399- | GCTCTCACCGCCGCGGCCCGGGTTCGATTC | |
| tRNA- | 161469470 | CCGGTCAGGGAA | |
| Glu- | (−) | | |
| CTC- | | | |
| 1- | | | |
| 5 | | | |
| Homo_ | chr6: | TCCCTGGTGGTCTAGTGGTTAGGATTCGGC | 323 |
| sapiens_ | 28982199- | GCTCTCACCGCCGCGGCCCGGGTTCGATTC | |
| tRNA- | 28982270 | CCGGTCAGGGAA | |
| Glu- | (+) | | |
| CTC- | | | |
| 1- | | | |
| 6 | | | |
| Homo_ | chr6: | TCCCTGGTGGTCTAGTGGTTAGGATTCGGC | 324 |
| sapiens_ | 125780247- | GCTCTCACCGCCGCGGCCCGGGTTCGATTC | |
| tRNA- | 125780318 | CCGGTCAGGGAA | |
| Glu- | (−) | | |
| CTC- | | | |
| 1- | | | |
| 7 | | | |
| Homo_ | chr1: | TCCCTGGTGGTCTAGTGGTTAGGATTCGGC | 325 |
| sapiens_ | 248874248- | GCTCTCACCGCCGCGGCCCGGGTTCGATTC | |
| tRNA- | 248874319 | CCGGTCAGGAAA | |
| Glu- | (+) | | |
| CTC- | | | |
| 2- | | | |
| 1 | | | |
| Homo_ | chr2: | TCCCATATGGTCTAGCGGTTAGGATTCCTG | 326 |
| sapiens_ | 130337128- | GTTTTCACCCAGGTGGCCCGGGTTCGACTC | |
| tRNA- | 130337199 | CCGGTATGGGAA | |
| Glu- | (−) | | |
| TTC- | | | |
| 1- | | | |
| 1 | | | |
| Homo_ | chr13: | TCCCATATGGTCTAGCGGTTAGGATTCCTG | 327 |
| sapiens_ | 41060738- | GTTTTCACCCAGGTGGCCCGGGTTCGACTC | |
| tRNA- | 41060809 | CCGGTATGGGAA | |
| Glu- | (−) | | |
| TTC- | | | |
| 1- | | | |
| 2 | | | |
| Homo_ | chr13: | TCCCACATGGTCTAGCGGTTAGGATTCCTG | 328 |
| sapiens_ | 44917927- | GTTTTCACCCAGGCGGCCCGGGTTCGACTC | |
| tRNA- | 44917998 | CCGGTGTGGGAA | |
| Glu- | (−) | | |
| TTC- | | | |
| 2- | | | |
| 1 | | | |
| Homo_ | chr15: | TCCCACATGGTCTAGCGGTTAGGATTCCTG | 329 |
| sapiens_ | 26082234- | GTTTTCACCCAGGCGGCCCGGGTTCGACTC | |
| tRNA- | 26082305 | CCGGTGTGGGAA | |
| Glu- | (−) | | |
| TTC- | | | |
| 2- | | | |
| 2 | | | |
| Homo_ | chr1: | TCCCTGGTGGTCTAGTGGCTAGGATTCGGC | 330 |
| sapiens_ | 16872583- | GCTTTCACCGCCGCGGCCCGGGTTCGATTC | |
| tRNA- | 16872654 | CCGGCCAGGGAA | |
| Glu- | (+) | | |
| TTC- | | | |
| 3- | | | |
| 1 | | | |
| Homo_ | chr1: | TCCCTGGTGGTCTAGTGGCTAGGATTCGGC | 331 |
| sapiens_ | 16535279- | GCTTTCACCGCCGCGGCCCGGGTTCGATTC | |
| tRNA- | 16535350 | CCGGTCAGGGAA | |
| Glu- | (−) | | |
| TTC- | | | |
| 4- | | | |
| 1 | | | |
| Homo_ | chr1: | TCCCTGGTGGTCTAGTGGCTAGGATTCGGC | 332 |
| sapiens_ | 161422093- | GCTTTCACCGCCGCGGCCCGGGTTCGATTC | |
| tRNA- | 161422164 | CCGGTCAGGGAA | |
| Glu- | (−) | | |
| TTC- | | | |
| 4- | | | |
| 2 | | | |
| Homo_ | chr1: | GCATTGGTGGTTCAGTGGTAGAATTCTCGC | 333 |
| sapiens_ | 16545939- | CTCCCACGCGGGAGACCCGGGTTCAATTCC | |
| tRNA- | 16546009 | CGGCCAATGCA | |
| Gly- | (−) | | |
| CCC- | | | |
| 1- | | | |
| 1 | | | |
| Homo_ | chr1: | GCATTGGTGGTTCAGTGGTAGAATTCTCGC | 334 |
| sapiens_ | 16861921- | CTCCCACGCGGGAGACCCGGGTTCAATTCC | |
| tRNA- | 16861991 | CGGCCAATGCA | |
| Gly- | (+) | | |
| CCC- | | | |
| 1- | | | |
| 2 | | | |
| Homo_ | chr2: | GCGCCGCTGGTGTAGTGGTATCATGCAAGA | 335 |
| sapiens_ | 70248991- | TTCCCATTCTTGCGACCCGGGTTCGATTCC | |
| tRNA- | 70249061 | CGGGCGGCGCA | |
| Gly- | (−) | | |
| CCC- | | | |
| 2- | | | |
| 1 | | | |
| Homo_ | chr16: | GCGCCGCTGGTGTAGTGGTATCATGCAAGA | 336 |
| sapiens_ | 636736- | TTCCCATTCTTGCGACCCGGGTTCGATTCC | |
| tRNA- | 636806 | CGGGCGGCGCA | |
| Gly- | (−) | | |
| CCC- | | | |
| 2- | | | |
| 2 | | | |
| Homo_ | chr17: | GCATTGGTGGTTCAATGGTAGAATTCTCGC | 337 |
| sapiens_ | 19860862- | CTCCCACGCAGGAGACCCAGGTTCGATTCC | |
| tRNA- | 19860932+) | TGGCCAATGCA | |
| Gly- | | | |
| CCC- | | | |
| 3- | | | |
| 1 | | | |
| Homo_ | chr1: | GCATGGGTGGTTCAGTGGTAGAATTCTCGC | 338 |
| sapiens_ | 161443304- | CTGCCACGCGGGAGGCCCGGGTTCGATTCC | |
| tRNA- | 161443374 | CGGCCCATGCA | |
| Gly- | (+) | | |
| GCC- | | | |
| 1- | | | |
| 1 | | | |
| Homo_ | chr1: | GCATGGGTGGTTCAGTGGTAGAATTCTCGC | 339 |
| sapiens_ | 161450677- | CTGCCACGCGGGAGGCCCGGGTTCGATTCC | |
| tRNA- | 161450747 | CGGCCCATGCA | |
| Gly- | (+) | | |
| GCC- | | | |
| 1- | | | |
| 2 | | | |
| Homo_ | chr1: | GCATGGGTGGTTCAGTGGTAGAATTCTCGC | 340 |
| sapiens_ | 161458108- | CTGCCACGCGGGAGGCCCGGGTTCGATTCC | |
| tRNA- | 161458178 | CGGCCCATGCA | |
| Gly- | (+) | | |
| GCC- | | | |
| 1- | | | |
| 3 | | | |
| Homo_ | chr1: | GCATGGGTGGTTCAGTGGTAGAATTCTCGC | 341 |
| sapiens_ | 161465468- | CTGCCACGCGGGAGGCCCGGGTTCGATTCC | |
| tRNA- | 161465538 | CGGCCCATGCA | |
| Gly- | (+) | | |
| GCC- | | | |
| 1- | | | |
| 4 | | | |
| Homo_ | chr21: | GCATGGGTGGTTCAGTGGTAGAATTCTCGC | 342 |
| sapiens_ | 17454789- | CTGCCACGCGGGAGGCCCGGGTTCGATTCC | |
| tRNA- | 17454859 | CGGCCCATGCA | |
| Gly- | (−) | | |
| GCC- | | | |
| 1- | | | |
| 5 | | | |
| Homo_ | chr1: | GCATTGGTGGTTCAGTGGTAGAATTCTCGC | 343 |
| sapiens_ | 161523847- | CTGCCACGCGGGAGGCCCGGGTTCGATTCC | |
| tRNA- | 161523917 | CGGCCAATGCA | |
| Gly- | (−) | | |
| GCC- | | | |
| 2- | | | |
| 1 | | | |
| Homo_ | chr2: | GCATTGGTGGTTCAGTGGTAGAATTCTCGC | 344 |
| sapiens_ | 156401147- | CTGCCACGCGGGAGGCCCGGGTTCGATTCC | |
| tRNA- | 156401217 | CGGCCAATGCA | |
| Gly- | (−) | | |
| GCC- | | | |
| 2- | | | |
| 2 | | | |
| Homo_ | chr6: | GCATTGGTGGTTCAGTGGTAGAATTCTCGC | 345 |
| sapiens_ | 27902908- | CTGCCACGCGGGAGGCCCGGGTTCGATTCC | |
| tRNA- | 27902978 | CGGCCAATGCA | |
| Gly- | (−) | | |
| GCC- | | | |
| 2- | | | |
| 3 | | | |
| Homo_ | chr16: | GCATTGGTGGTTCAGTGGTAGAATTCTCGC | 346 |
| sapiens_ | 70779039- | CTGCCACGCGGGAGGCCCGGGTTCGATTCC | |
| tRNA- | 70779109 | CGGCCAATGCA | |
| Gly- | (−) | | |
| GCC- | | | |
| 2- | | | |
| 4 | | | |
| Homo_ | chr16: | GCATTGGTGGTTCAGTGGTAGAATTCTCGC | 347 |
| sapiens_ | 70789507- | CTGCCACGCGGGAGGCCCGGGTTCGATTCC | |
| tRNA- | 70789577 | CGGCCAATGCA | |
| Gly- | (+) | | |
| GCC- | | | |
| 2- | | | |
| 5 | | | |
| Homo_ | chr17: | GCATTGGTGGTTCAGTGGTAGAATTCTCGC | 348 |
| sapiens_ | 8125746- | CTGCCACGCGGGAGGCCCGGGTTCGATTCC | |
| tRNA- | 8125816 | CGGCCAATGCA | |
| Gly- | (+) | | |
| GCC- | | | |
| 2- | | | |
| 6 | | | |
| Homo_ | chr16: | GCATTGGTGGTTCAGTGGTAGAATTCTCGC | 349 |
| sapiens_ | 70778211- | CTGCCACGCGGGAGGCCCGGGTTTGATTCC | |
| tRNA- | 70778281 | CGGCCAGTGCA | |
| Gly- | (−) | | |
| GCC- | | | |
| 3- | | | |
| 1 | | | |
| Homo_ | chr1: | GCATAGGTGGTTCAGTGGTAGAATTCTTGC | 350 |
| sapiens_ | 161480566- | CTGCCACGCAGGAGGCCCAGGTTTGATTCC | |
| tRNA- | 161480636 | TGGCCCATGCA | |
| Gly- | (+) | | |
| GCC- | | | |
| 4- | | | |
| 1 | | | |
| Homo_ | chr16: | GCATTGGTGGTTCAGTGGTAGAATTCTCGC | 351 |
| sapiens_ | 70788694- | CTGCCATGCGGGCGGCCGGGCTTCGATTCC | |
| tRNA- | 70788764 | TGGCCAATGCA | |
| Gly- | (+) | | |
| GCC- | | | |
| 5- | | | |
| 1 | | | |
| Homo_ | chr19: | GCGTTGGTGGTATAGTGGTTAGCATAGCTG | 352 |
| sapiens_ | 4724070- | CCTTCCAAGCAGTTGACCCGGGTTCGATTC | |
| tRNA- | 4724141 | CCGGCCAACGCA | |
| Gly- | (+) | | |
| TCC- | | | |
| 1- | | | |
| 1 | | | |
| Homo_ | chr1: | GCGTTGGTGGTATAGTGGTGAGCATAGCTG | 353 |
| sapiens_ | 146037061- | CCTTCCAAGCAGTTGACCCGGGTTCGATTC | |
| tRNA- | 146037132 | CCGGCCAACGCA | |
| Gly- | (+) | | |
| TCC- | | | |
| 2- | | | |
| 1 | | | |
| Homo_ | chr1: | GCGTTGGTGGTATAGTGGTGAGCATAGCTG | 354 |
| sapiens_ | 161447585- | CCTTCCAAGCAGTTGACCCGGGTTCGATTC | |
| tRNA- | 161447656 | CCGGCCAACGCA | |
| Gly- | (−) | | |
| TCC- | | | |
| 2- | | | |
| 2 | | | |
| Homo_ | chr1: | GCGTTGGTGGTATAGTGGTGAGCATAGCTG | 355 |
| sapiens_ | 161454966- | CCTTCCAAGCAGTTGACCCGGGTTCGATTC | |
| tRNA- | 161455037 | CCGGCCAACGCA | |
| Gly- | (−) | | |
| TCC- | | | |
| 2- | | | |
| 3 | | | |
| Homo_ | chr1: | GCGTTGGTGGTATAGTGGTGAGCATAGCTG | 356 |
| sapiens_ | 161462376- | CCTTCCAAGCAGTTGACCCGGGTTCGATTC | |
| tRNA- | 161462447 | CCGGCCAACGCA | |
| Gly- | (−) | | |
| TCC- | | | |
| 2- | | | |
| 4 | | | |
| Homo_ | chr1: | GCGTTGGTGGTATAGTGGTGAGCATAGCTG | 357 |
| sapiens_ | 161469757- | CCTTCCAAGCAGTTGACCCGGGTTCGATTC | |
| tRNA- | 161469828 | CCGGCCAACGCA | |
| Gly- | (−) | | |
| TCC- | | | |
| 2- | | | |
| 5 | | | |
| Homo_ | chr1: | GCGTTGGTGGTATAGTGGTGAGCATAGCTG | 358 |
| sapiens_ | 161531113- | CCTTCCAAGCAGTTGACCCGGGTTCGATTC | |
| tRNA- | 161531184 | CCGGCCAACGCA | |
| Gly- | (+) | | |
| TCC- | | | |
| 2- | | | |
| 6 | | | |
| Homo_ | chr17: | GCGTTGGTGGTATAGTGGTAAGCATAGCTG | 359 |
| sapiens_ | 8221548- | CCTTCCAAGCAGTTGACCCGGGTTCGATTC | |
| tRNA- | 8221619 | CCGGCCAACGCA | |
| Gly- | (+) | | |
| TCC- | | | |
| 3- | | | |
| 1 | | | |
| Homo_ | chr1: | GCGTTGGTGGTATAGTGGTGAGCATAGTTG | 360 |
| sapiens_ | 161440171- | CCTTCCAAGCAGTTGACCCGGGCTCGATTC | |
| tRNA- | 161440242 | CCGCCCAACGCA | |
| Gly- | (−) | | |
| TCC- | | | |
| 4- | | | |
| 1 | | | |
| Homo_ | chr1: | GCCGTGATCGTATAGTGGTTAGTACTCTGC | 361 |
| sapiens_ | 146038044- | GTTGTGGCCGCAGCAACCTCGGTTCGAATC | |
| tRNA- | 146038115 | CGAGTCACGGCA | |
| His- | (+) | | |
| GTG- | | | |
| 1- | | | |
| 1 | | | |
| Homo_ | chr1: | GCCGTGATCGTATAGTGGTTAGTACTCTGC | 362 |
| sapiens_ | 147073225- | GTTGTGGCCGCAGCAACCTCGGTTCGAATC | |
| tRNA- | 147073296 | CGAGTCACGGCA | |
| His- | (+) | | |
| GTG- | | | |
| 1- | | | |
| 2 | | | |
| Homo_ | chr1: | GCCGTGATCGTATAGTGGTTAGTACTCTGC | 363 |
| sapiens_ | 148281365- | GTTGTGGCCGCAGCAACCTCGGTTCGAATC | |
| tRNA- | 148281436 | CGAGTCACGGCA | |
| His- | (+) | | |
| GTG- | | | |
| 1- | | | |
| 3 | | | |
| Homo_ | chr1: | GCCGTGATCGTATAGTGGTTAGTACTCTGC | 364 |
| sapiens_ | 148302734- | GTTGTGGCCGCAGCAACCTCGGTTCGAATC | |
| tRNA- | 148302805 | CGAGTCACGGCA | |
| His- | (−) | | |
| GTG- | | | |
| 1- | | | |
| 4 | | | |
| Homo_ | chr6: | GCCGTGATCGTATAGTGGTTAGTACTCTGC | 365 |
| sapiens_ | 27158127- | GTTGTGGCCGCAGCAACCTCGGTTCGAATC | |
| tRNA- | 27158198 | CGAGTCACGGCA | |
| His- | (+) | | |
| GTG- | | | |
| 1- | | | |
| 5 | | | |
| Homo_ | chr9: | GCCGTGATCGTATAGTGGTTAGTACTCTGC | 366 |
| sapiens_ | 14433940- | GTTGTGGCCGCAGCAACCTCGGTTCGAATC | |
| tRNA- | 14434011 | CGAGTCACGGCA | |
| His- | (−) | | |
| GTG- | | | |
| 1- | | | |
| 6 | | | |
| Homo_ | chr15: | GCCGTGATCGTATAGTGGTTAGTACTCTGC | 367 |
| sapiens_ | 45198606- | GTTGTGGCCGCAGCAACCTCGGTTCGAATC | |
| tRNA- | 45198677 | CGAGTCACGGCA | |
| His- | (−) | | |
| GTG- | | | |
| 1- | | | |
| 7 | | | |
| Homo_ | chr15: | GCCGTGATCGTATAGTGGTTAGTACTCTGC | 368 |
| sapiens_ | 45200413- | GTTGTGGCCGCAGCAACCTCGGTTCGAATC | |
| tRNA- | 45200484 | CGAGTCACGGCA | |
| His- | (−) | | |
| GTG- | | | |
| 1- | | | |
| 8 | | | |
| Homo_ | chr15: | GCCGTGATCGTATAGTGGTTAGTACTCTGC | 369 |
| sapiens_ | 45201151- | GTTGTGGCCGCAGCAACCTCGGTTCGAATC | |
| tRNA- | 45201222 | CGAGTCACGGCA | |
| His- | (+) | | |
| GTG- | | | |
| 1- | | | |
| 9 | | | |
| Homo_ | chr6: | GGCCGGTTAGCTCAGTTGGTTAGAGCGTGG | 370 |
| sapiens_ | 57822973- | CGCTAATAACGCCAAGGTCGCGGGTTCGAT | |
| tRNA- | 57823046 | CCCCGTACGGGCCA | |
| Ile- | (+) | | |
| AAT- | | | |
| 1- | | | |
| 1 | | | |
| Homo_ | chr6: | GGCCGGTTAGCTCAGTCGGTTAGAGCGTGG | 371 |
| sapiens_ | 57800211- | TGCTAATAACGCCAAGGTCGCGGGTTCGAT | |
| tRNA- | 57800284 | CCCCGTGCCGGTCA | |
| Ile- | (+) | | |
| AAT- | | | |
| 12- | | | |
| 1 | | | |
| Homo_ | chr6: | GGCCGGTTAGCTCAGTTGGTTAGAGCGTGG | 372 |
| sapiens_ | 27688188- | TGCTAATAACGCCAAGGTCGCGGGTTCGAT | |
| tRNA- | 27688261 | CCCCGTACTGGCCA | |
| Ile- | (+) | | |
| AAT- | | | |
| 2- | | | |
| 1 | | | |
| Homo_ | chr6: | GGCTGGTTAGCTCAGTTGGTTAGAGCGTGG | 373 |
| sapiens_ | 27275211- | TGCTAATAACGCCAAGGTCGCGGGTTCGAT | |
| tRNA- | 27275284 | CCCCGTACTGGCCA | |
| Ile- | (−) | | |
| AAT- | | | |
| 3- | | | |
| 1 | | | |
| Homo_ | chr17: | GGCCGGTTAGCTCAGTTGGTTAGAGCGTGG | 374 |
| sapiens_ | 8226991- | TGCTAATAACGCCAAGGTCGCGGGTTCGAA | |
| tRNA- | 8227064 | CCCCGTACGGGCCA | |
| Ile- | (−) | | |
| AAT- | | | |
| 4- | | | |
| 1 | | | |
| Homo_ | chr6: | GGCCGGTTAGCTCAGTTGGTTAGAGCGTGG | 375 |
| sapiens_ | 26554122- | TGCTAATAACGCCAAGGTCGCGGGTTCGAT | |
| tRNA- | 26554195 | CCCCGTACGGGCCA | |
| Ile- | (+) | | |
| AAT- | | | |
| 5- | | | |
| 1 | | | |
| Homo_ | chr6: | GGCCGGTTAGCTCAGTTGGTTAGAGCGTGG | 376 |
| sapiens_ | 27177215- | TGCTAATAACGCCAAGGTCGCGGGTTCGAT | |
| tRNA- | 27177288 | CCCCGTACGGGCCA | |
| Ile- | (−) | | |
| AAT- | | | |
| 5- | | | |
| 2 | | | |
| Homo_ | chr6: | GGCCGGTTAGCTCAGTTGGTTAGAGCGTGG | 377 |
| sapiens_ | 27237571- | TGCTAATAACGCCAAGGTCGCGGGTTCGAT | |
| tRNA- | 27237644 | CCCCGTACGGGCCA | |
| Ile- | (−) | | |
| AAT- | | | |
| 5- | | | |
| 3 | | | |
| Homo_ | chr14: | GGCCGGTTAGCTCAGTTGGTTAGAGCGTGG | 378 |
| sapiens_ | 102317092- | TGCTAATAACGCCAAGGTCGCGGGTTCGAT | |
| tRNA- | 102317165 | CCCCGTACGGGCCA | |
| Ile- | (+) | | |
| AAT- | | | |
| 5- | | | |
| 4 | | | |
| Homo_ | chr17: | GGCCGGTTAGCTCAGTTGGTTAGAGCGTGG | 379 |
| sapiens_ | 8187593- | TGCTAATAACGCCAAGGTCGCGGGTTCGAT | |
| tRNA- | 8187666 | CCCCGTACGGGCCA | |
| Ile- | (+) | | |
| AAT- | | | |
| 5- | | | |
| 5 | | | |
| Homo_ | chr6: | GGCCGGTTAGCTCAGTTGGTTAGAGCGTGG | 380 |
| sapiens_ | 26756552- | TGCTAATAACGCTAAGGTCGCGGGTTCGAT | |
| tRNA- | 26756625 | CCCCGTACTGGCCA | |
| Ile- | (+) | | |
| AAT- | | | |
| 6- | | | |
| 1 | | | |
| Homo_ | chr6: | GGCCGGTTAGCTCAGTTGGTCAGAGCGTGG | 381 |
| sapiens_ | 26720992- | TGCTAATAACGCCAAGGTCGCGGGTTCGAT | |
| tRNA- | 26721065 | CCCCGTACGGGCCA | |
| Ile- | (−) | | |
| AAT- | | | |
| 7- | | | |
| 1 | | | |
| Homo_ | chr6: | GGCCGGTTAGCTCAGTTGGTCAGAGCGTGG | 382 |
| sapiens_ | 26780622- | TGCTAATAACGCCAAGGTCGCGGGTTCGAT | |
| tRNA- | 26780695 | CCCCGTACGGGCCA | |
| Ile- | (+) | | |
| AAT- | | | |
| 7- | | | |
| 2 | | | |
| Homo_ | chr6: | GGCCGGTTAGCTCAGTCGGCTAGAGCGTGG | 383 |
| sapiens_ | 27668583- | TGCTAATAACGCCAAGGTCGCGGGTTCGAT | |
| tRNA- | 27668656 | CCCCGTACGGGCCA | |
| Ile- | (+) | | |
| AAT- | | | |
| 8- | | | |
| 1 | | | |
| Homo_ | chr6: | GGCTGGTTAGTTCAGTTGGTTAGAGCGTGG | 384 |
| sapiens_ | 27273960- | TGCTAATAACGCCAAGGTCGTGGGTTCGAT | |
| tRNA- | 27274033 | CCCCATATCGGCCA | |
| Ile- | (+) | | |
| AAT- | | | |
| 9- | | | |
| 1 | | | |
| Homo_ | chrX: | GGCCGGTTAGCTCAGTTGGTAAGAGCGTGG | 385 |
| sapiens_ | 3838377- | TGCTGATAACACCAAGGTCGCGGGCTCGAC | |
| tRNA- | 3838450 | TCCCGCACCGGCCA | |
| Ile- | (−) | | |
| GAT- | | | |
| 1- | | | |
| 1 | | | |
| Homo_ | chrX: | GGCCGGTTAGCTCAGTTGGTAAGAGCGTGG | 386 |
| sapiens_ | 3876801- | TGCTGATAACACCAAGGTCGCGGGCTCGAC | |
| tRNA- | 3876874 | TCCCGCACCGGCCA | |
| Ile- | (−) | | |
| GAT- | | | |
| 1- | | | |
| 2 | | | |
| Homo_ | chrX: | GGCCGGTTAGCTCAGTTGGTAAGAGCGTGG | 387 |
| sapiens_ | 3915230- | TGCTGATAACACCAAGGTCGCGGGCTCGAC | |
| tRNA- | 3915303 | TCCCGCACCGGCCA | |
| Ile- | (−) | | |
| GAT- | | | |
| 1- | | | |
| 3 | | | |
| Homo_ | chr19: | GCTCCAGTGGCGCAATCGGTTAGCGCGCGG | 388 |
| sapiens_ | 39412168- | TACTTATATGACAGTGCGAGCGGAGCAATG | |
| tRNA- | 39412260 | CCGAGGTTGTGAGTTCGATCCTCACCTGGA | |
| Ile- | (−) | GCA | |
| TAT- | | | |
| 1- | | | |
| 1 | | | |
| Homo_ | chr2: | GCTCCAGTGGCGCAATCGGTTAGCGCGCGG | 389 |
| sapiens_ | 42810536- | TACTTATACAGCAGTACATGCAGAGCAATG | |
| tRNA- | 42810628 | CCGAGGTTGTGAGTTCGAGCCTCACCTGGA | |
| Ile- | (+) | GCA | |
| TAT- | | | |
| 2- | | | |
| 1 | | | |
| Homo_ | chr6: | GCTCCAGTGGCGCAATCGGTTAGCGCGCGG | 390 |
| sapiens_ | 27020346- | TACTTATATGGCAGTATGTGTGCGAGTGAT | |
| tRNA- | 27020439 | GCCGAGGTTGTGAGTTCGAGCCTCACCTGG | |
| Ile- | (+) | AGCA | |
| TAT- | | | |
| 2- | | | |
| 2 | | | |
| Homo_ | chr6: | GCTCCAGTGGCGCAATCGGTTAGCGCGCGG | 391 |
| sapiens_ | 27631421- | TACTTATACAACAGTATATGTGCGGGTGAT | |
| tRNA- | 27631514 | GCCGAGGTTGTGAGTTCGAGCCTCACCTGG | |
| Ile- | (+) | AGCA | |
| TAT- | | | |
| 2- | | | |
| 3 | | | |
| Homo_ | chr6: | GCTCCAGTGGCGCAATCGGTTAGCGCGCGG | 392 |
| sapiens_ | 28537590- | TACTTATAAGACAGTGCACCTGTGAGCAAT | |
| tRNA- | 28537683 | GCCGAGGTTGTGAGTTCAAGCCTCACCTGG | |
| Ile- | (+) | AGCA | |
| TAT- | | | |
| 3- | | | |
| 1 | | | |
| Homo_ | chr5: | GGTAGCGTGGCCGAGCGGTCTAAGGCGCTG | 393 |
| sapiens_ | 181097474- | GATTAAGGCTCCAGTCTCTTCGGAGGCGTG | |
| tRNA- | 181097555 | GGTTCGAATCCCACCGCTGCCA | |
| Leu- | (−) | | |
| AAG- | | | |
| 1- | | | |
| 1 | | | |
| Homo_ | chr5: | GGTAGCGTGGCCGAGCGGTCTAAGGCGCTG | 394 |
| sapiens_ | 181101840- | GATTAAGGCTCCAGTCTCTTCGGAGGCGTG | |
| tRNA- | 181101921 | GGTTCGAATCCCACCGCTGCCA | |
| Leu- | (+) | | |
| AAG- | | | |
| 1- | | | |
| 2 | | | |
| Homo_ | chr5: | GGTAGCGTGGCCGAGCGGTCTAAGGCGCTG | 395 |
| sapiens_ | 181174044- | GATTAAGGCTCCAGTCTCTTCGGAGGCGTG | |
| tRNA- | 181174125 | GGTTCGAATCCCACCGCTGCCA | |
| Leu- | (−) | | |
| AAG- | | | |
| 1- | | | |
| 3 | | | |
| Homo_ | chr5: | GGTAGCGTGGCCGAGCGGTCTAAGGCGCTG | 396 |
| sapiens_ | 181187701- | GATTAAGGCTCCAGTCTCTTCGGGGGCGTG | |
| tRNA- | 181187782 | GGTTCGAATCCCACCGCTGCCA | |
| Leu- | (+) | | |
| AAG- | | | |
| 2- | | | |
| 1 | | | |
| Homo_ | chr6: | GGTAGCGTGGCCGAGCGGTCTAAGGCGCTG | 397 |
| sapiens_ | 28943622- | GATTAAGGCTCCAGTCTCTTCGGGGGCGTG | |
| tRNA- | 28943703 | GGTTCGAATCCCACCGCTGCCA | |
| Leu- | (−) | | |
| AAG- | | | |
| 2- | | | |
| 2 | | | |
| Homo_ | chr14: | GGTAGCGTGGCCGAGCGGTCTAAGGCGCTG | 398 |
| sapiens_ | 20610132- | GATTAAGGCTCCAGTCTCTTCGGGGGCGTG | |
| tRNA- | 20610213 | GGTTCGAATCCCACCGCTGCCA | |
| Leu- | (+) | | |
| AAG- | | | |
| 2- | | | |
| 3 | | | |
| Homo_ | chr16: | GGTAGCGTGGCCGAGCGGTCTAAGGCGCTG | 399 |
| sapiens_ | 22297140- | GATTAAGGCTCCAGTCTCTTCGGGGGCGTG | |
| tRNA- | 22297221 | GGTTCGAATCCCACCGCTGCCA | |
| Leu- | (+) | | |
| AAG- | | | |
| 2- | | | |
| 4 | | | |
| Homo_ | chr6: | GGTAGCGTGGCCGAGCGGTCTAAGGCGCTG | 400 |
| sapiens_ | 28989002- | GATTAAGGCTCCAGTCTCTTCGGGGGCGTG | |
| tRNA- | 28989083 | GGTTCAAATCCCACCGCTGCCA | |
| Leu- | (+) | | |
| AAG- | | | |
| 3- | | | |
| 1 | | | |
| Homo_ | chr6: | GGTAGCGTGGCCGAGTGGTCTAAGACGCTG | 401 |
| sapiens_ | 28478623- | GATTAAGGCTCCAGTCTCTTCGGGGGCGTG | |
| tRNA- | 28478704 | GGTTTGAATCCCACCGCTGCCA | |
| Leu- | (−) | | |
| AAG- | | | |
| 4- | | | |
| 1 | | | |
| Homo_ | chr6: | GTCAGGATGGCCGAGTGGTCTAAGGCGCCA | 402 |
| sapiens_ | 28896223- | GACTCAAGCTAAGCTTCCTCCGCGGTGGGG | |
| tRNA- | 28896328 | ATTCTGGTCTCCAATGGAGGCGTGGGTTCG | |
| Leu- | (−) | AATCCCACTTCTGACA | |
| CAA- | | | |
| 1- | | | |
| 1 | | | |
| Homo_ | chr6: | GTCAGGATGGCCGAGTGGTCTAAGGCGCCA | 403 |
| sapiens_ | 28941053- | GACTCAAGCTTGGCTTCCTCGTGTTGAGGA | |
| tRNA- | 28941157 | TTCTGGTCTCCAATGGAGGCGTGGGTTCGA | |
| Leu- | (+) | ATCCCACTTCTGACA | |
| CAA- | | | |
| 1- | | | |
| 2 | | | |
| Homo_ | chr6: | GTCAGGATGGCCGAGTGGTCTAAGGCGCCA | 404 |
| sapiens_ | 27605638- | GACTCAAGCTTACTGCTTCCTGTGTTCGGG | |
| tRNA- | 27605745 | TCTTCTGGTCTCCGTATGGAGGCGTGGGTT | |
| Leu- | (−) | CGAATCCCACTTCTGACA | |
| CAA- | | | |
| 2- | | | |
| 1 | | | |
| Homo_ | chr6: | GTCAGGATGGCCGAGTGGTCTAAGGCGCCA | 405 |
| sapiens_ | 27602569- | GACTCAAGTTGCTACTTCCCAGGTTTGGGG | |
| tRNA- | 27602675 | CTTCTGGTCTCCGCATGGAGGCGTGGGTTC | |
| Leu- | (−) | GAATCCCACTTCTGACA | |
| CAA- | | | |
| 3- | | | |
| 1 | | | |
| Homo_ | chr1: | GTCAGGATGGCCGAGTGGTCTAAGGCGCCA | 406 |
| sapiens_ | 248873855- | GACTCAAGGTAAGCACCTTGCCTGCGGGCT | |
| tRNA- | 248873960 | TTCTGGTCTCCGGATGGAGGCGTGGGTTCG | |
| Leu- | (+) | AATCCCACTTCTGACA | |
| CAA- | | | |
| 4- | | | |
| 1 | | | |
| Homo_ | chr11: | GCCTCCTTAGTGCAGTAGGTAGCGCATCAG | 407 |
| sapiens_ | 9275243- | TCTCAAAATCTGAATGGTCCTGAGTTCAAG | |
| tRNA- | 9275316 | CCTCAGAGGGGGCA | |
| Leu- | (+) | | |
| CAA- | | | |
| 5- | | | |
| 1 | | | |
| Homo_ | chr1: | GTCAGGATGGCCGAGCAGTCTTAAGGCGCT | 408 |
| sapiens_ | 161611946- | GCGTTCAAATCGCACCCTCCGCTGGAGGCG | |
| tRNA- | 161612029 | TGGGTTCGAATCCCACTTTTGACA | |
| Leu- | (−) | | |
| CAA- | | | |
| 6- | | | |
| 1 | | | |
| Homo_ | chr1: | GTCAGGATGGCCGAGCGGTCTAAGGCGCTG | 409 |
| sapiens_ | 161441533- | CGTTCAGGTCGCAGTCTCCCCTGGAGGCGT | |
| tRNA- | 161441615 | GGGTTCGAATCCCACTCCTGACA | |
| Leu- | (+) | | |
| CAG- | | | |
| 1- | | | |
| 1 | | | |
| Homo_ | chr1: | GTCAGGATGGCCGAGCGGTCTAAGGCGCTG | 410 |
| sapiens_ | 161448951- | CGTTCAGGTCGCAGTCTCCCCTGGAGGCGT | |
| tRNA- | 161449033 | GGGTTCGAATCCCACTCCTGACA | |
| Leu- | (+) | | |
| CAG- | | | |
| 1- | | | |
| 2 | | | |
| Homo_ | chr1: | GTCAGGATGGCCGAGCGGTCTAAGGCGCTG | 411 |
| sapiens_ | 161456332- | CGTTCAGGTCGCAGTCTCCCCTGGAGGCGT | |
| tRNA- | 161456414 | GGGTTCGAATCCCACTCCTGACA | |
| Leu- | (+) | | |
| CAG- | | | |
| 1- | | | |
| 3 | | | |
| Homo_ | chr1: | GTCAGGATGGCCGAGCGGTCTAAGGCGCTG | 412 |
| sapiens_ | 161463742- | CGTTCAGGTCGCAGTCTCCCCTGGAGGCGT | |
| tRNA- | 161463824 | GGGTTCGAATCCCACTCCTGACA | |
| Leu- | (+) | | |
| CAG- | | | |
| 1- | | | |
| 4 | | | |
| Homo_ | chr1: | GTCAGGATGGCCGAGCGGTCTAAGGCGCTG | 413 |
| sapiens_ | 161471123- | CGTTCAGGTCGCAGTCTCCCCTGGAGGCGT | |
| tRNA- | 161471205 | GGGTTCGAATCCCACTCCTGACA | |
| Leu- | (+) | | |
| CAG- | | | |
| 1- | | | |
| 5 | | | |
| Homo_ | chr1: | GTCAGGATGGCCGAGCGGTCTAAGGCGCTG | 414 |
| sapiens_ | 161530342- | CGTTCAGGTCGCAGTCTCCCCTGGAGGCGT | |
| tRNA- | 161530424 | GGGTTCGAATCCCACTCCTGACA | |
| Leu- | (−) | | |
| CAG- | | | |
| 1- | | | |
| 6 | | | |
| Homo_ | chr6: | GTCAGGATGGCCGAGCGGTCTAAGGCGCTG | 415 |
| sapiens_ | 26521208- | CGTTCAGGTCGCAGTCTCCCCTGGAGGCGT | |
| tRNA- | 26521290 | GGGTTCGAATCCCACTCCTGACA | |
| Leu- | (+) | | |
| CAG- | | | |
| 1- | | | |
| 7 | | | |
| Homo_ | chr16: | GTCAGGATGGCCGAGCGGTCTAAGGCGCTG | 416 |
| sapiens_ | 57299951- | CGTTCAGGTCGCAGTCTCCCCTGGAGGCGT | |
| tRNA- | 57300033 | GGGTTCGAATCCCACTTCTGACA | |
| Leu- | (+) | | |
| CAG- | | | |
| 2- | | | |
| 1 | | | |
| Homo_ | chr16: | GTCAGGATGGCCGAGCGGTCTAAGGCGCTG | 417 |
| sapiens_ | 57300480- | CGTTCAGGTCGCAGTCTCCCCTGGAGGCGT | |
| tRNA- | 57300562 | GGGTTCGAATCCCACTTCTGACA | |
| Leu- | (−) | | |
| CAG- | | | |
| 2- | | | |
| 2 | | | |
| Homo_ | chr6: | ACCAGGATGGCCGAGTGGTTAAGGCGTTGG | 418 |
| sapiens_ | 144216547- | ACTTAAGATCCAATGGACATATGTCCGCGT | |
| tRNA- | 144216629 | GGGTTCGAACCCCACTCCTGGTA | |
| Leu- | (+) | | |
| TAA- | | | |
| 1- | | | |
| 1 | | | |
| Homo_ | chr6: | ACCGGGATGGCCGAGTGGTTAAGGCGTTGG | 419 |
| sapiens_ | 27721119- | ACTTAAGATCCAATGGGCTGGTGCCCGCGT | |
| tRNA- | 27721201 | GGGTTCGAACCCCACTCTCGGTA | |
| Leu- | (−) | | |
| TAA- | | | |
| 2- | | | |
| 1 | | | |
| Homo_ | chr11: | ACCAGAATGGCCGAGTGGTTAAGGCGTTGG | 420 |
| sapiens_ | 59551755- | ACTTAAGATCCAATGGATTCATATCCGCGT | |
| tRNA- | 59551837 | GGGTTCGAACCCCACTTCTGGTA | |
| Leu- | (+) | | |
| TAA- | | | |
| 3- | | | |
| 1 | | | |
| Homo_ | chr6: | ACCGGGATGGCTGAGTGGTTAAGGCGTTGG | 421 |
| sapiens_ | 27230555- | ACTTAAGATCCAATGGACAGGTGTCCGCGT | |
| tRNA- | 27230637 | GGGTTCGAGCCCCACTCCCGGTA | |
| Leu- | (−) | | |
| TAA- | | | |
| 4- | | | |
| 1 | | | |
| Homo_ | chr17: | GGTAGCGTGGCCGAGCGGTCTAAGGCGCTG | 422 |
| sapiens_ | 8120314- | GATTTAGGCTCCAGTCTCTTCGGAGGCGTG | |
| tRNA- | 8120395 | GGTTCGAATCCCACCGCTGCCA | |
| Leu- | (−) | | |
| TAG- | | | |
| 1- | | | |
| 1 | | | |
| Homo_ | chr14: | GGTAGTGTGGCCGAGCGGTCTAAGGCGCTG | 423 |
| sapiens_ | 20625370- | GATTTAGGCTCCAGTCTCTTCGGGGGCGTG | |
| tRNA- | 20625451 | GGTTCGAATCCCACCACTGCCA | |
| Leu- | (+) | | |
| TAG- | | | |
| 2- | | | |
| 1 | | | |
| Homo_ | chr16: | GGTAGCGTGGCCGAGTGGTCTAAGGCGCTG | 424 |
| sapiens_ | 22195711- | GATTTAGGCTCCAGTCATTTCGATGGCGTG | |
| tRNA- | 22195792 | GGTTCGAATCCCACCGCTGCCA | |
| Leu- | (−) | | |
| TAG- | | | |
| 3- | | | |
| 1 | | | |
| Homo_ | chr14: | GCCCGGCTAGCTCAGTCGGTAGAGCATGGG | 425 |
| sapiens_ | 58239895- | ACTCTTAATCCCAGGGTCGTGGGTTCGAGC | |
| tRNA- | 58239967 | CCCACGTTGGGCG | |
| Lys- | (−) | | |
| CTT- | | | |
| 1- | | | |
| 1 | | | |
| Homo_ | chr15: | GCCCGGCTAGCTCAGTCGGTAGAGCATGGG | 426 |
| sapiens_ | 78860562- | ACTCTTAATCCCAGGGTCGTGGGTTCGAGC | |
| tRNA- | 78860634 | CCCACGTTGGGCG | |
| Lys- | (+) | | |
| CTT- | | | |
| 1- | | | |
| 2 | | | |
| Homo_ | chr19: | GCCCAGCTAGCTCAGTCGGTAGAGCATAAG | 427 |
| sapiens_ | 35575848- | ACTCTTAATCTCAGGGTTGTGGATTCGTGC | |
| tRNA- | 35575920 | CCCATGCTGGGTG | |
| Lys- | (+) | | |
| CTT- | | | |
| 10- | | | |
| 1 | | | |
| Homo_ | chr19: | GCAGCTAGCTCAGTCGGTAGAGCATGAGAC | 428 |
| sapiens_ | 51922140- | TCTTAATCTCAGGGTCATGGGTTCGTGCCC | |
| tRNA- | 51922213 | CATGTTGGGTGCCA | |
| Lys- | (−) | | |
| CTT- | | | |
| 11- | | | |
| 1 | | | |
| Homo_ | chr1: | GCCCGGCTAGCTCAGTCGGTAGAGCATGAG | 429 |
| sapiens_ | 146039401- | ACTCTTAATCTCAGGGTCGTGGGTTCGAGC | |
| tRNA- | 146039473 | CCCACGTTGGGCG | |
| Lys- | (+) | | |
| CTT- | | | |
| 2- | | | |
| 1 | | | |
| Homo_ | chr5: | GCCCGGCTAGCTCAGTCGGTAGAGCATGAG | 430 |
| sapiens_ | 181207755- | ACTCTTAATCTCAGGGTCGTGGGTTCGAGC | |
| tRNA- | 181207827 | CCCACGTTGGGCG | |
| Lys- | (+) | | |
| CTT- | | | |
| 2- | | | |
| 2 | | | |
| Homo_ | chr5: | GCCCGGCTAGCTCAGTCGGTAGAGCATGAG | 431 |
| sapiens_ | 181221979- | ACTCTTAATCTCAGGGTCGTGGGTTCGAGC | |
| tRNA- | 181222051 | CCCACGTTGGGCG | |
| Lys- | (−) | | |
| CTT- | | | |
| 2- | | | |
| 3 | | | |
| Homo_ | chr6: | GCCCGGCTAGCTCAGTCGGTAGAGCATGAG | 432 |
| sapiens_ | 26556546- | ACTCTTAATCTCAGGGTCGTGGGTTCGAGC | |
| tRNA- | 26556618 | CCCACGTTGGGCG | |
| Lys- | (+) | | |
| CTT- | | | |
| 2- | | | |
| 4 | | | |
| Homo_ | chr16: | GCCCGGCTAGCTCAGTCGGTAGAGCATGAG | 433 |
| sapiens_ | 3175691- | ACTCTTAATCTCAGGGTCGTGGGTTCGAGC | |
| tRNA- | 3175763 | CCCACGTTGGGCG | |
| Lys- | (+) | | |
| CTT- | | | |
| 2- | | | |
| 5 | | | |
| Homo_ | chr16: | GCCCGGCTAGCTCAGTCGGTAGAGCATGAG | 434 |
| sapiens_ | 3157405- | ACCCTTAATCTCAGGGTCGTGGGTTCGAGC | |
| tRNA- | 3157477 | CCCACGTTGGGCG | |
| Lys- | (−) | | |
| CTT- | | | |
| 3- | | | |
| 1 | | | |
| Homo_ | chr16: | GCCCGGCTAGCTCAGTCGGTAGAGCATGGG | 435 |
| sapiens_ | 3191501- | ACTCTTAATCTCAGGGTCGTGGGTTCGAGC | |
| tRNA- | 3191573 | CCCACGTTGGGCG | |
| Lys- | (+) | | |
| CTT- | | | |
| 4- | | | |
| 1 | | | |
| Homo_ | chr16: | GCCCGGCTAGCTCAGTCGATAGAGCATGAG | 436 |
| sapiens_ | 3180554- | ACTCTTAATCTCAGGGTCGTGGGTTCGAGC | |
| tRNA- | 3180626 | CGCACGTTGGGCG | |
| Lys- | (−) | | |
| CTT- | | | |
| 5- | | | |
| 1 | | | |
| Homo_ | chr1: | GCCCAGCTAGCTCAGTCGGTAGAGCATGAG | 437 |
| sapiens_ | 54957869- | ACTCTTAATCTCAGGGTCATGGGTTTGAGC | |
| tRNA- | 54957941 | CCCACGTTTGGTG | |
| Lys- | (−) | | |
| CTT- | | | |
| 7- | | | |
| 1 | | | |
| Homo_ | chr16: | GCCTGGCTAGCTCAGTCGGCAAAGCATGAG | 438 |
| sapiens_ | 3164938- | ACTCTTAATCTCAGGGTCGTGGGCTCGAGC | |
| tRNA- | 3165010 | TCCATGTTGGGCG | |
| Lys- | (+) | | |
| CTT- | | | |
| 8- | | | |
| 1 | | | |
| Homo_ | chr5: | GCCCGACTACCTCAGTCGGTGGAGCATGGG | 439 |
| sapiens_ | 26198430- | ACTCTTCATCCCAGGGTTGTGGGTTCGAGC | |
| tRNA- | 26198502 | CCCACATTGGGCA | |
| Lys- | (−). | | |
| CTT- | | | |
| 9- | | | |
| 1 | | | |
| Homo_ | chr16: | GCCTGGATAGCTCAGTTGGTAGAGCATCAG | 440 |
| sapiens_ | 73478317- | ACTTTTAATCTGAGGGTCCAGGGTTCAAGT | |
| tRNA- | 73478389 | CCCTGTTCAGGCA | |
| Lys- | (−) | | |
| TTT- | | | |
| 1- | | | |
| 1 | | | |
| Homo_ | chr12: | ACCCAGATAGCTCAGTCAGTAGAGCATCAG | 441 |
| sapiens_ | 27690373- | ACTTTTAATCTGAGGGTCCAAGGTTCATGT | |
| tRNA- | 27690445 | CCCTTTTTGGGTG | |
| Lys- | (+) | | |
| TTT- | | | |
| 11- | | | |
| 1 | | | |
| Homo_ | chr11: | GCCTGGATAGCTCAGTTGGTAGAGCATCAG | 442 |
| sapiens_ | 122559947- | ACTTTTAATCTGAGGGTCCAGGGTTCAAGT | |
| tRNA- | 122560019 | CCCTGTTCAGGCG | |
| Lys- | (+) | | |
| TTT- | | | |
| 2- | | | |
| 1 | | | |
| Homo_ | chr1: | GCCCGGATAGCTCAGTCGGTAGAGCATCAG | 443 |
| sapiens_ | 204506527- | ACTTTTAATCTGAGGGTCCAGGGTTCAAGT | |
| tRNA- | 204506599 | CCCTGTTCGGGCG | |
| Lys- | (+) | | |
| TTT- | | | |
| 3- | | | |
| 1 | | | |
| Homo_ | chr1: | GCCCGGATAGCTCAGTCGGTAGAGCATCAG | 444 |
| sapiens_ | 204507030- | ACTTTTAATCTGAGGGTCCAGGGTTCAAGT | |
| tRNA- | 204507102 | CCCTGTTCGGGCG | |
| Lys- | (−) | | |
| TTT- | | | |
| 3- | | | |
| 2 | | | |
| Homo_ | chr6: | GCCCGGATAGCTCAGTCGGTAGAGCATCAG | 445 |
| sapiens_ | 28951029- | ACTTTTAATCTGAGGGTCCAGGGTTCAAGT | |
| tRNA- | 28951101 | CCCTGTTCGGGCG | |
| Lys- | (+) | | |
| TTT- | | | |
| 3- | | | |
| 3 | | | |
| Homo_ | chr11: | GCCCGGATAGCTCAGTCGGTAGAGCATCAG | 446 |
| sapiens_ | 59560335- | ACTTTTAATCTGAGGGTCCAGGGTTCAAGT | |
| tRNA- | 59560407 | CCCTGTTCGGGCG | |
| Lys- | (−) | | |
| TTT- | | | |
| 3- | | | |
| 4 | | | |
| Homo_ | chr17: | GCCCGGATAGCTCAGTCGGTAGAGCATCAG | 447 |
| sapiens_ | 8119155- | ACTTTTAATCTGAGGGTCCAGGGTTCAAGT | |
| tRNA- | 8119227 | CCCTGTTCGGGCG | |
| Lys- | (+) | | |
| TTT- | | | |
| 3- | | | |
| 5 | | | |
| Homo_ | chr6: | GCCTGGATAGCTCAGTCGGTAGAGCATCAG | 448 |
| sapiens_ | 27591814- | ACTTTTAATCTGAGGGTCCAGGGTTCAAGT | |
| tRNA- | 27591886 | CCCTGTTCAGGCG | |
| Lys- | (−) | | |
| TTT- | | | |
| 4- | | | |
| 1 | | | |
| Homo_ | chr11: | GCCCGGATAGCTCAGTCGGTAGAGCATCAG | 449 |
| sapiens_ | 59556429- | ACTTTTAATCTGAGGGTCCGGGGTTCAAGT | |
| tRNA- | 59556501 | CCCTGTTCGGGCG | |
| Lys- | (+) | | |
| TTT- | | | |
| 5- | | | |
| 1 | | | |
| Homo_ | chr6: | GCCTGGGTAGCTCAGTCGGTAGAGCATCAG | 450 |
| sapiens_ | 27334990- | ACTTTTAATCTGAGGGTCCAGGGTTCAAGT | |
| tRNA- | 27335062 | CCCTGTCCAGGCG | |
| Lys- | (−) | | |
| TTT- | | | |
| 6- | | | |
| 1 | | | |
| Homo_ | chr6: | GCCTGGATAGCTCAGTTGGTAGAACATCAG | 451 |
| sapiens_ | 28747744- | ACTTTTAATCTGACGGTGCAGGGTTCAAGT | |
| tRNA- | 28747816 | CCCTGTTCAGGCG | |
| Lys- | (+) | | |
| TTT- | | | |
| 7- | | | |
| 1 | | | |
| Homo_ | chr8: | GCCTCGTTAGCGCAGTAGGTAGCGCGTCAG | 452 |
| sapiens_ | 123157230- | TCTCATAATCTGAAGGTCGTGAGTTCGATC | |
| tRNA- | 123157302 | CTCACACGGGGCA | |
| Met- | (−) | | |
| CAT- | | | |
| 1- | | | |
| 1 | | | |
| Homo_ | chr16: | GCCCTCTTAGCGCAGTGGGCAGCGCGTCAG | 453 |
| sapiens_ | 71426493- | TCTCATAATCTGAAGGTCCTGAGTTCGAGC | |
| tRNA- | 71426565 | CTCAGAGAGGGCA | |
| Met- | (+) | | |
| CAT- | | | |
| 2- | | | |
| 1 | | | |
| Homo_ | chr6: | GCCTCCTTAGCGCAGTAGGCAGCGCGTCAG | 454 |
| sapiens_ | 28944575- | TCTCATAATCTGAAGGTCCTGAGTTCGAAC | |
| tRNA- | 28944647 | CTCAGAGGGGGCA | |
| Met- | (+) | | |
| CAT- | | | |
| 3- | | | |
| 1 | | | |
| Homo_ | chr6: | GCCTCCTTAGCGCAGTAGGCAGCGCGTCAG | 455 |
| sapiens_ | 28953265- | TCTCATAATCTGAAGGTCCTGAGTTCGAAC | |
| tRNA- | 28953337 | CTCAGAGGGGGCA | |
| Met- | (−) | | |
| CAT- | | | |
| 3- | | | |
| 2 | | | |
| Homo_ | chr6: | GCCCTCTTAGCGCAGCGGGCAGCGCGTCAG | 456 |
| sapiens_ | 26735370- | TCTCATAATCTGAAGGTCCTGAGTTCGAGC | |
| tRNA- | 26735442 | CTCAGAGAGGGCA | |
| Met- | (−) | | |
| CAT- | | | |
| 4- | | | |
| 1 | | | |
| Homo_ | chr6: | GCCCTCTTAGCGCAGCGGGCAGCGCGTCAG | 457 |
| sapiens_ | 26743263- | TCTCATAATCTGAAGGTCCTGAGTTCGAGC | |
| tRNA- | 26743335 | CTCAGAGAGGGCA | |
| Met- | (+) | | |
| CAT- | | | |
| 4- | | | |
| 2 | | | |
| Homo_ | chr6: | GCCCTCTTAGCGCAGCGGGCAGCGCGTCAG | 458 |
| sapiens_ | 26766234- | TCTCATAATCTGAAGGTCCTGAGTTCGAGC | |
| tRNA- | 26766306 | CTCAGAGAGGGCA | |
| Met- | | | |
| CAT- | | | |
| 4- | | | |
| 3 | | | |
| Homo_ | chr6: | GCCCTCTTAGCGCAGCTGGCAGCGCGTCAG | 459 |
| sapiens_ | 26701483- | TCTCATAATCTGAAGGTCCTGAGTTCAAGC | |
| tRNA- | 26701555 | CTCAGAGAGGGCA | |
| Met- | (+) | | |
| CAT- | | | |
| 5- | | | |
| 1 | | | |
| Homo_ | chr6: | GCCCTCTTAGCGCAGCTGGCAGCGCGTCAG | 460 |
| sapiens_ | 26800113- | TCTCATAATCTGAAGGTCCTGAGTTCAAGC | |
| tRNA- | 26800185 | CTCAGAGAGGGCA | |
| Met- | (−) | | |
| CAT- | | | |
| 5- | | | |
| 2 | | | |
| Homo_ | chr16: | GCCTCGTTAGCGCAGTAGGCAGCGCGTCAG | 461 |
| sapiens_ | 87384022- | TCTCATAATCTGAAGGTCGTGAGTTCGAGC | |
| tRNA- | 87384094 | CTCACACGGGGCA | |
| Met- | (−) | | |
| CAT- | | | |
| 6- | | | |
| 1 | | | |
| Homo_ | chr6: | GCCCTCTTAGTGCAGCTGGCAGCGCGTCAG | 462 |
| sapiens_ | 57842214- | TTTCATAATCTGAAAGTCCTGAGTTCAAGC | |
| tRNA- | 57842286 | CTCAGAGAGGGCA | |
| Met- | (−) | | |
| CAT- | | | |
| 7- | | | |
| 1 | | | |
| Homo_ | chr6: | GCCGAAATAGCTCAGTTGGGAGAGCGTTAG | 463 |
| sapiens_ | 28790722- | ACTGAAGATCTAAAGGTCCCTGGTTCGATC | |
| tRNA- | 28790794 | CCGGGTTTCGGCA | |
| Phe- | (−) | | |
| GAA- | | | |
| 1- | | | |
| 1 | | | |
| Homo_ | chr6: | GCCGAAATAGCTCAGTTGGGAGAGCGTTAG | 464 |
| sapiens_ | 28981672- | ACTGAAGATCTAAAGGTCCCTGGTTCGATC | |
| tRNA- | 28981744 | CCGGGTTTCGGCA | |
| Phe- | (−) | | |
| GAA- | | | |
| 1- | | | |
| 2 | | | |
| Homo_ | chr11: | GCCGAAATAGCTCAGTTGGGAGAGCGTTAG | 465 |
| sapiens_ | 59557497- | ACTGAAGATCTAAAGGTCCCTGGTTCGATC | |
| tRNA- | 59557569 | CCGGGTTTCGGCA | |
| Phe- | (−) | | |
| GAA- | | | |
| 1- | | | |
| 3 | | | |
| Homo_ | chr12: | GCCGAAATAGCTCAGTTGGGAGAGCGTTAG | 466 |
| sapiens_ | 124927843- | ACTGAAGATCTAAAGGTCCCTGGTTCGATC | |
| tRNA- | 124927915 | CCGGGTTTCGGCA | |
| Phe- | (−) | | |
| GAA- | | | |
| 1- | | | |
| 4 | | | |
| Homo_ | chr13: | GCCGAAATAGCTCAGTTGGGAGAGCGTTAG | 467 |
| sapiens_ | 94549650- | ACTGAAGATCTAAAGGTCCCTGGTTCGATC | |
| tRNA- | 94549722 | CCGGGTTTCGGCA | |
| Phe- | (−) | | |
| GAA- | | | |
| 1- | | | |
| 5 | | | |
| Homo_ | chr19: | GCCGAAATAGCTCAGTTGGGAGAGCGTTAG | 468 |
| sapiens_ | 1383362- | ACTGAAGATCTAAAGGTCCCTGGTTCGATC | |
| tRNA- | 1383434 | CCGGGTTTCGGCA | |
| Phe- | (−) | | |
| GAA- | | | |
| 1- | | | |
| 6 | | | |
| Homo_ | chr11: | GCCGAAATAGCTCAGTTGGGAGAGCGTTAG | 469 |
| sapiens_ | 59566380- | ACTGAAGATCTAAAGGTCCCTGGTTCAATC | |
| tRNA- | 59566452 | CCGGGTTTCGGCA | |
| Phe- | (−) | | |
| GAA- | | | |
| 2- | | | |
| 1 | | | |
| Homo_ | chr6: | GCCGAGATAGCTCAGTTGGGAGAGCGTTAG | 470 |
| sapiens_ | 28807833- | ACTGAAGATCTAAAGGTCCCTGGTTCAATC | |
| tRNA- | 28807905 | CCGGGTTTCGGCA | |
| Phe- | (−) | | |
| GAA- | | | |
| 3- | | | |
| 1 | | | |
| Homo_ | chr6: | GCCGAAATAGCTCAGTTGGGAGAGCGTTAG | 471 |
| sapiens_ | 28823316- | ACCGAAGATCTTAAAGGTCCCTGGTTCAAT | |
| tRNA- | 28823389 | CCCGGGTTTCGGCA | |
| Phe- | (−) | | |
| GAA- | | | |
| 4- | | | |
| 1 | | | |
| Homo_ | chr6: | GCTGAAATAGCTCAGTTGGGAGAGCGTTAG | 472 |
| sapiens_ | 28763597- | ACTGAAGATCTTAAAGTTCCCTGGTTCAAC | |
| tRNA- | 28763670 | CCTGGGTTTCAGCC | |
| Phe- | (−) | | |
| GAA- | | | |
| 6- | | | |
| 1 | | | |
| Homo_ | chr16: | GGCTCGTTGGTCTAGGGGTATGATTCTCGC | 473 |
| sapiens_ | 3191989- | TTAGGATGCGAGAGGTCCCGGGTTCAAATC | |
| tRNA- | 3192060 | CCGGACGAGCCC | |
| Pro- | (+) | | |
| AGG- | | | |
| 1- | | | |
| 1 | | | |
| Homo_ | chr1: | GGCTCGTTGGTCTAGGGGTATGATTCTCGC | 474 |
| sapiens_ | 167715488- | TTAGGGTGCGAGAGGTCCCGGGTTCAAATC | |
| tRNA- | 167715559 | CCGGACGAGCCC | |
| Pro- | (−) | | |
| AGG- | | | |
| 2- | | | |
| 1 | | | |
| Homo_ | chr6: | GGCTCGTTGGTCTAGGGGTATGATTCTCGC | 475 |
| sapiens_ | 26555270- | TTAGGGTGCGAGAGGTCCCGGGTTCAAATC | |
| tRNA- | 26555341 | CCGGACGAGCCC | |
| Pro- | (+) | | |
| AGG- | | | |
| 2- | | | |
| 2 | | | |
| Homo_ | chr7: | GGCTCGTTGGTCTAGGGGTATGATTCTCGC | 476 |
| sapiens_ | 128783450- | TTAGGGTGCGAGAGGTCCCGGGTTCAAATC | |
| tRNA- | 128783521 | CCGGACGAGCCC | |
| Pro- | (+) | | |
| AGG- | | | |
| 2- | | | |
| 3 | | | |
| Homo_ | chr11: | GGCTCGTTGGTCTAGGGGTATGATTCTCGC | 477 |
| sapiens_ | 76235513- | TTAGGGTGCGAGAGGTCCCGGGTTCAAATC | |
| tRNA- | 76235584 | CCGGACGAGCCC | |
| Pro- | (+) | | |
| AGG- | | | |
| 2- | | | |
| 4 | | | |
| Homo_ | chr14: | GGCTCGTTGGTCTAGGGGTATGATTCTCGC | 478 |
| sapiens_ | 20609336- | TTAGGGTGCGAGAGGTCCCGGGTTCAAATC | |
| tRNA- | 20609407 | CCGGACGAGCCC | |
| Pro- | (−) | | |
| AGG- | | | |
| 2- | | | |
| 5 | | | |
| Homo_ | chr14: | GGCTCGTTGGTCTAGGGGTATGATTCTCGC | 479 |
| sapiens_ | 20613401- | TTAGGGTGCGAGAGGTCCCGGGTTCAAATC | |
| tRNA- | 20613472 | CCGGACGAGCCC | |
| Pro- | (−) | | |
| AGG- | | | |
| 2- | | | |
| 6 | | | |
| Homo_ | chr16: | GGCTCGTTGGTCTAGGGGTATGATTCTCGC | 480 |
| sapiens_ | 3182635- | TTAGGGTGCGAGAGGTCCCGGGTTCAAATC | |
| tRNA- | 3182706 | CCGGACGAGCCC | |
| Pro- | | | |
| AGG- | | | |
| 2- | | | |
| 7 | | | |
| Homo_ | chr16: | GGCTCGTTGGTCTAGGGGTATGATTCTCGC | 481 |
| sapiens_ | 3189634- | TTAGGGTGCGAGAGGTCCCGGGTTCAAATC | |
| tRNA- | 3189705 | CCGGACGAGCCC | |
| Pro- | | | |
| AGG- | | | |
| 2- | | | |
| 8 | | | |
| Homo_ | chr1: | GGCTCGTTGGTCTAGGGGTATGATTCTCGC | 482 |
| sapiens_ | 167714725- | TTCGGGTGCGAGAGGTCCCGGGTTCAAATC | |
| tRNA- | 167714796 | CCGGACGAGCCC | |
| Pro- | (+) | | |
| CGG- | | | |
| 1- | | | |
| 1 | | | |
| Homo_ | chr16: | GGCTCGTTGGTCTAGGGGTATGATTCTCGC | 483 |
| sapiens_ | 3172048- | TTCGGGTGCGAGAGGTCCCGGGTTCAAATC | |
| tRNA- | 3172119 | CCGGACGAGCCC | |
| Pro- | | | |
| CGG- | | | |
| 1- | | | |
| 2 | | | |
| Homo_ | chr17: | GGCTCGTTGGTCTAGGGGTATGATTCTCGC | 484 |
| sapiens_ | 8222833- | TTCGGGTGCGAGAGGTCCCGGGTTCAAATC | |
| tRNA- | 8222904 | CCGGACGAGCCC | |
| Pro- | (−) | | |
| CGG- | | | |
| 1- | | | |
| 3 | | | |
| Homo_ | chr6: | GGCTCGTTGGTCTAGGGGTATGATTCTCGC | 485 |
| sapiens_ | 27091742- | TTCGGGTGTGAGAGGTCCCGGGTTCAAATC | |
| tRNA- | 27091813+) | CCGGACGAGCCC | |
| Pro- | | | |
| CGG- | | | |
| 2- | | | |
| 1 | | | |
| Homo_ | chr14: | GGCTCGTTGGTCTAGTGGTATGATTCTCGC | 486 |
| sapiens_ | 20633006- | TTTGGGTGCGAGAGGTCCCGGGTTCAAATC | |
| tRNA- | 20633077 | CCGGACGAGCCC | |
| Pro- | (+) | | |
| TGG- | | | |
| 1- | | | |
| 1 | | | |
| Homo_ | chr11: | GGCTCGTTGGTCTAGGGGTATGATTCTCGG | 487 |
| sapiens_ | 76235825- | TTTGGGTCCGAGAGGTCCCGGGTTCAAATC | |
| tRNA- | 76235896 | CCGGACGAGCCC | |
| Pro- | (−) | | |
| TGG- | | | |
| 2- | | | |
| 1 | | | |
| Homo_ | chr5: | GGCTCGTTGGTCTAGGGGTATGATTCTCGC | 488 |
| sapiens_ | 181188854- | TTTGGGTGCGAGAGGTCCCGGGTTCAAATC | |
| tRNA- | 181188925 | CCGGACGAGCCC | |
| Pro- | (−) | | |
| TGG- | | | |
| 3- | | | |
| 1 | | | |
| Homo_ | chr14: | GGCTCGTTGGTCTAGGGGTATGATTCTCGC | 489 |
| sapiens_ | 20684016- | TTTGGGTGCGAGAGGTCCCGGGTTCAAATC | |
| tRNA- | 20684087 | CCGGACGAGCCC | |
| Pro- | (+) | | |
| TGG- | | | |
| 3- | | | |
| 2 | | | |
| Homo_ | chr16: | GGCTCGTTGGTCTAGGGGTATGATTCTCGC | 490 |
| sapiens_ | 3158922- | TTTGGGTGCGAGAGGTCCCGGGTTCAAATC | |
| tRNA- | 3158993 | CCGGACGAGCCC | |
| Pro- | (+) | | |
| TGG- | | | |
| 3- | | | |
| 3 | | | |
| Homo_ | chr16: | GGCTCGTTGGTCTAGGGGTATGATTCTCGC | 491 |
| sapiens_ | 3184133- | TTTGGGTGCGAGAGGTCCCGGGTTCAAATC | |
| tRNA- | 3184204 | CCGGACGAGCCC | |
| Pro- | (−) | | |
| TGG- | | | |
| 3- | | | |
| 4 | | | |
| Homo_ | chr16: | GGCTCGTTGGTCTAGGGGTATGATTCTCGC | 492 |
| sapiens_ | 3188094- | TTTGGGTGCGAGAGGTCCCGGGTTCAAATC | |
| tRNA- | 3188165 | CCGGACGAGCCC | |
| Pro- | (+) | | |
| TGG- | | | |
| 3- | | | |
| 5 | | | |
| Homo_ | chr19: | GCCCGGATGATCCTCAGTGGTCTGGGGTGC | 493 |
| sapiens_ | 45478601- | AGGCTTCAAACCTGTAGCTGTCTAGCGACA | |
| tRNA- | 45478687 | GAGTGGTTCAATTCCACCTTTCGGGCG | |
| SeC- | (−) | | |
| TCA- | | | |
| 1- | | | |
| 1 | | | |
| Homo_ | chr6: | GTAGTCGTGGCCGAGTGGTTAAGGCGATGG | 494 |
| sapiens_ | 27541775- | ACTAGAAATCCATTGGGGTTTCCCCGCGCA | |
| tRNA- | 27541856 | GGTTCGAATCCTGCCGACTACG | |
| Ser- | (−) | | |
| AGA- | | | |
| 1- | | | |
| 1 | | | |
| Homo_ | chr6: | GTAGTCGTGGCCGAGTGGTTAAGGCGATGG | 495 |
| sapiens_ | 26327589- | ACTAGAAATCCATTGGGGTCTCCCCGCGCA | |
| tRNA- | 26327670 | GGTTCGAATCCTGCCGACTACG | |
| Ser- | (+) | | |
| AGA- | | | |
| 2- | | | |
| 1 | | | |
| Homo_ | chr6: | GTAGTCGTGGCCGAGTGGTTAAGGCGATGG | 496 |
| sapiens_ | 27478812- | ACTAGAAATCCATTGGGGTCTCCCCGCGCA | |
| tRNA- | 27478893+) | GGTTCGAATCCTGCCGACTACG | |
| Ser- | | | |
| AGA- | | | |
| 2- | | | |
| 2 | | | |
| Homo_ | chr6: | GTAGTCGTGGCCGAGTGGTTAAGGCGATGG | 497 |
| sapiens_ | 27495814- | ACTAGAAATCCATTGGGGTCTCCCCGCGCA | |
| tRNA- | 27495895 | GGTTCGAATCCTGCCGACTACG | |
| Ser- | (+) | | |
| AGA- | | | |
| 2- | | | |
| 3 | | | |
| Homo_ | chr6: | GTAGTCGTGGCCGAGTGGTTAAGGCGATGG | 498 |
| sapiens_ | 27503039- | ACTAGAAATCCATTGGGGTCTCCCCGCGCA | |
| tRNA- | 27503120 | GGTTCGAATCCTGCCGACTACG | |
| Ser- | (+) | | |
| AGA- | | | |
| 2- | | | |
| 4 | | | |
| Homo_ | chr8: | GTAGTCGTGGCCGAGTGGTTAAGGCGATGG | 499 |
| sapiens_ | 95269657- | ACTAGAAATCCATTGGGGTCTCCCCGCGCA | |
| tRNA- | 95269738 | GGTTCGAATCCTGCCGACTACG | |
| Ser- | (−) | | |
| AGA- | | | |
| 2- | | | |
| 5 | | | |
| Homo_ | chr17: | GTAGTCGTGGCCGAGTGGTTAAGGCGATGG | 500 |
| sapiens_ | 8226610- | ACTAGAAATCCATTGGGGTCTCCCCGCGCA | |
| tRNA- | 8226691 | GGTTCGAATCCTGCCGACTACG | |
| Ser- | (−) | | |
| AGA- | | | |
| 2- | | | |
| 6 | | | |
| Homo_ | chr6: | GTAGTCGTGGCCGAGTGGTTAAGGCGATGG | 501 |
| sapiens_ | 27532208- | ACTAGAAATCCATTGGGGTTTCCCCACGCA | |
| tRNA- | 27532289 | GGTTCGAATCCTGCCGACTACG | |
| Ser- | (+) | | |
| AGA- | | | |
| 3- | | | |
| 1 | | | |
| Homo_ | chr6: | GTAGTCGTGGCCGAGTGGTTAAGGTGATGG | 502 |
| sapiens_ | 27553413- | ACTAGAAACCCATTGGGGTCTCCCCGCGCA | |
| tRNA- | 27553494 | GGTTCGAATCCTGCCGACTACG | |
| Ser- | (−) | | |
| AGA- | | | |
| 4- | | | |
| 1 | | | |
| Homo_ | chr17: | GCTGTGATGGCCGAGTGGTTAAGGCGTTGG | 503 |
| sapiens_ | 8138881- | ACTCGAAATCCAATGGGGTCTCCCCGCGCA | |
| tRNA- | 8138962 | GGTTCGAATCCTGCTCACAGCG | |
| Ser- | (−) | | |
| CGA- | | | |
| 1- | | | |
| 1 | | | |
| Homo_ | chr6: | GCTGTGATGGCCGAGTGGTTAAGGCGTTGG | 504 |
| sapiens_ | 27209849- | ACTCGAAATCCAATGGGGTCTCCCCGCGCA | |
| tRNA- | 27209930 | GGTTCAAATCCTGCTCACAGCG | |
| Ser- | (+) | | |
| CGA- | | | |
| 2- | | | |
| 1 | | | |
| Homo_ | chr6: | GCTGTGATGGCCGAGTGGTTAAGGTGTTGG | 505 |
| sapiens_ | 27672450- | ACTCGAAATCCAATGGGGGTTCCCCGCGCA | |
| tRNA- | 27672531 | GGTTCAAATCCTGCTCACAGCG | |
| Ser- | (−) | | |
| CGA- | | | |
| 3- | | | |
| 1 | | | |
| Homo_ | chr12: | GTCACGGTGGCCGAGTGGTTAAGGCGTTGG | 506 |
| sapiens_ | 56190364- | ACTCGAAATCCAATGGGGTTTCCCCGCACA | |
| tRNA- | 56190445 | GGTTCGAATCCTGTTCGTGACG | |
| Ser- | (+) | | |
| CGA- | | | |
| 4- | | | |
| 1 | | | |
| Homo_ | chr6: | GACGAGGTGGCCGAGTGGTTAAGGCGATGG | 507 |
| sapiens_ | 27097306- | ACTGCTAATCCATTGTGCTCTGCACGCGTG | |
| tRNA- | 27097387 | GGTTCGAATCCCACCCTCGTCG | |
| Ser- | (+) | | |
| GCT- | | | |
| 1- | | | |
| 1 | | | |
| Homo_ | chr6: | GACGAGGTGGCCGAGTGGTTAAGGCGATGG | 508 |
| sapiens_ | 27297996- | ACTGCTAATCCATTGTGCTCTGCACGCGTG | |
| tRNA- | 27298077 | GGTTCGAATCCCACCTTCGTCG | |
| Ser- | (+) | | |
| GCT- | | | |
| 2- | | | |
| 1 | | | |
| Homo_ | chr11: | GACGAGGTGGCCGAGTGGTTAAGGCGATGG | 509 |
| sapiens_ | 66348120- | ACTGCTAATCCATTGTGCTTTGCACGCGTG | |
| tRNA- | 66348201 | GGTTCGAATCCCATCCTCGTCG | |
| Ser- | (+) | | |
| GCT- | | | |
| 3- | | | |
| 1 | | | |
| Homo_ | chr6: | GACGAGGTGGCCGAGTGGTTAAGGCGATGG | 510 |
| sapiens_ | 28597340- | ACTGCTAATCCATTGTGCTCTGCACGCGTG | |
| tRNA- | 28597421 | GGTTCGAATCCCATCCTCGTCG | |
| Ser- | (−) | | |
| GCT- | | | |
| 4- | | | |
| 1 | | | |
| Homo_ | chr15: | GACGAGGTGGCCGAGTGGTTAAGGCGATGG | 511 |
| sapiens_ | 40593825- | ACTGCTAATCCATTGTGCTCTGCACGCGTG | |
| tRNA- | 40593906 | GGTTCGAATCCCATCCTCGTCG | |
| Ser- | (−) | | |
| GCT- | | | |
| 4- | | | |
| 2 | | | |
| Homo_ | chr17: | GACGAGGTGGCCGAGTGGTTAAGGCGATGG | 512 |
| sapiens_ | 8186866- | ACTGCTAATCCATTGTGCTCTGCACGCGTG | |
| tRNA- | 8186947 | GGTTCGAATCCCATCCTCGTCG | |
| Ser- | (+) | | |
| GCT- | | | |
| 4- | | | |
| 3 | | | |
| Homo_ | chr6: | GACGAGGTGGCCGAGTGGTTAAGGCGATGG | 513 |
| sapiens_ | 28213037- | ACTGCTAATCCATTGTGCTCTGCACACGTG | |
| tRNA- | 28213118 | GGTTCGAATCCCATCCTCGTCG | |
| Ser- | (+) | | |
| GCT- | | | |
| 5- | | | |
| 1 | | | |
| Homo_ | chr6: | GGAGAGGCCTGGCCGAGTGGTTAAGGCGAT | 514 |
| sapiens_ | 26305490- | GGACTGCTAATCCATTGTGCTCTGCACGCG | |
| tRNA- | 26305573 | TGGGTTCGAATCCCATCCTCGTCG | |
| Ser- | (−) | | |
| GCT- | | | |
| 6- | | | |
| 1 | | | |
| Homo_ | chr10: | GCAGCGATGGCCGAGTGGTTAAGGCGTTGG | 515 |
| sapiens_ | 67764503- | ACTTGAAATCCAATGGGGTCTCCCCGCGCA | |
| tRNA- | 67764584 | GGTTCGAACCCTGCTCGCTGCG | |
| Ser- | (+) | | |
| TGA- | | | |
| 1- | | | |
| 1 | | | |
| Homo_ | chr6: | GTAGTCGTGGCCGAGTGGTTAAGGCGATGG | 516 |
| sapiens_ | 27545689- | ACTTGAAATCCATTGGGGTTTCCCCGCGCA | |
| tRNA- | 27545770 | GGTTCGAATCCTGCCGACTACG | |
| Ser- | (+) | | |
| TGA- | | | |
| 2- | | | |
| 1 | | | |
| Homo_ | chr6: | GTAGTCGTGGCCGAGTGGTTAAGGCGATGG | 517 |
| sapiens_ | 26312596- | ACTTGAAATCCATTGGGGTCTCCCCGCGCA | |
| tRNA- | 26312677 | GGTTCGAATCCTGCCGACTACG | |
| Ser- | (−) | | |
| TGA- | | | |
| 3- | | | |
| 1 | | | |
| Homo_ | chr6: | GTAGTCGTGGCCGAGTGGTTAAGGCGATGG | 518 |
| sapiens_ | 27505828- | ACTTGAAATCCATTGGGGTTTCCCCGCGCA | |
| tRNA- | 27505909 | GGTTCGAATCCTGTCGGCTACG | |
| Ser- | (−) | | |
| TGA- | | | |
| 4- | | | |
| 1 | | | |
| Homo_ | chr17: | GGCGCCGTGGCTTAGTTGGTTAAAGCGCCT | 519 |
| sapiens_ | 8187160- | GTCTAGTAAACAGGAGATCCTGGGTTCGAA | |
| tRNA- | 8187233 | TCCCAGCGGTGCCT | |
| Thr- | | | |
| AGT- | | | |
| 1- | | | |
| 1 | | | |
| Homo_ | chr17: | GGCGCCGTGGCTTAGTTGGTTAAAGCGCCT | 520 |
| sapiens_ | 8226235- | GTCTAGTAAACAGGAGATCCTGGGTTCGAA | |
| tRNA- | 8226308 | TCCCAGCGGTGCCT | |
| Thr- | (−) | | |
| AGT- | | | |
| 1- | | | |
| 2 | | | |
| Homo_ | chr19: | GGCGCCGTGGCTTAGTTGGTTAAAGCGCCT | 521 |
| sapiens_ | 33177057- | GTCTAGTAAACAGGAGATCCTGGGTTCGAA | |
| tRNA- | 33177130 | TCCCAGCGGTGCCT | |
| Thr- | (+) | | |
| AGT- | | | |
| 1- | | | |
| 3 | | | |
| Homo_ | chr6: | GGCTCCGTGGCTTAGCTGGTTAAAGCGCCT | 522 |
| sapiens_ | 26532917- | GTCTAGTAAACAGGAGATCCTGGGTTCGAA | |
| tRNA- | 26532990 | TCCCAGCGGGGCCT | |
| Thr- | (−) | | |
| AGT- | | | |
| 2- | | | |
| 1 | | | |
| Homo_ | chr6: | GGCTCCGTGGCTTAGCTGGTTAAAGCGCCT | 523 |
| sapiens_ | 27684695- | GTCTAGTAAACAGGAGATCCTGGGTTCGAA | |
| tRNA- | 27684768 | TCCCAGCGGGGCCT | |
| Thr- | (−) | | |
| AGT- | | | |
| 2- | | | |
| 2 | | | |
| Homo_ | chr6: | GGCTCCGTAGCTTAGTTGGTTAAAGCGCCT | 524 |
| sapiens_ | 28726018- | GTCTAGTAAACAGGAGATCCTGGGTTCGAC | |
| tRNA- | 28726091 | TCCCAGCGGGGCCT | |
| Thr- | (+) | | |
| AGT- | | | |
| 3- | | | |
| 1 | | | |
| Homo_ | chr6: | GGCTTCGTGGCTTAGCTGGTTAAAGCGCCT | 525 |
| sapiens_ | 27726694- | GTCTAGTAAACAGGAGATCCTGGGTTCGAA | |
| tRNA- | 27726767 | TCCCAGCGAGGCCT | |
| Thr- | (+) | | |
| AGT- | | | |
| 4- | | | |
| 1 | | | |
| Homo_ | chr17: | GGCGCCGTGGCTTAGCTGGTTAAAGCGCCT | 526 |
| sapiens_ | 8139452- | GTCTAGTAAACAGGAGATCCTGGGTTCGAA | |
| tRNA- | 8139525 | TCCCAGCGGTGCCT | |
| Thr- | (−) | | |
| AGT- | | | |
| 5- | | | |
| 1 | | | |
| Homo_ | chr6: | GGCCCTGTGGCTTAGCTGGTCAAAGCGCCT | 527 |
| sapiens_ | 27162271- | GTCTAGTAAACAGGAGATCCTGGGTTCGAA | |
| tRNA- | 27162344 | TCCCAGCGGGGCCT | |
| Thr- | | | |
| AGT- | | | |
| 6- | | | |
| 1 | | | |
| Homo_ | chr6: | GGCTCTATGGCTTAGTTGGTTAAAGCGCCT | 528 |
| sapiens_ | 28488993- | GTCTCGTAAACAGGAGATCCTGGGTTCGAC | |
| tRNA- | 28489066 | TCCCAGTGGGGCCT | |
| Thr- | (−) | | |
| CGT- | | | |
| 1- | | | |
| 1 | | | |
| Homo_ | chr16: | GGCGCGGTGGCCAAGTGGTAAGGCGTCGGT | 529 |
| sapiens_ | 14285893- | CTCGTAAACCGAAGATCACGGGTTCGAACC | |
| tRNA- | 14285964 | CCGTCCGTGCCT | |
| Thr- | (+) | | |
| CGT- | | | |
| 2- | | | |
| 1 | | | |
| Homo_ | chr6: | GGCTCTGTGGCTTAGTTGGCTAAAGCGCCT | 530 |
| sapiens_ | 28648207- | GTCTCGTAAACAGGAGATCCTGGGTTCGAA | |
| tRNA- | 28648280 | TCCCAGCGGGGCCT | |
| Thr- | (−) | | |
| CGT- | | | |
| 3- | | | |
| 1 | | | |
| Homo_ | chr17: | GGCGCGGTGGCCAAGTGGTAAGGCGTCGGT | 531 |
| sapiens_ | 31550074- | CTCGTAAACCGAAGATCGCGGGTTCGAACC | |
| tRNA- | 31550145 | CCGTCCGTGCCT | |
| Thr- | (+) | | |
| CGT- | | | |
| 4- | | | |
| 1 | | | |
| Homo_ | chr6: | GGCCCTGTAGCTCAGCGGTTGGAGCGCTGG | 532 |
| sapiens_ | 27618356- | TCTCGTAAACCTAGGGGTCGTGAGTTCAAA | |
| tRNA- | 27618429 | TCTCACCAGGGCCT | |
| Thr- | (+) | | |
| CGT- | | | |
| 5- | | | |
| 1 | | | |
| Homo_ | chr6: | GGCTCTATGGCTTAGTTGGTTAAAGCGCCT | 533 |
| sapiens_ | 28474552- | GTCTTGTAAACAGGAGATCCTGGGTTCGAA | |
| tRNA- | 28474625 | TCCCAGTAGAGCCT | |
| Thr- | (−) | | |
| TGT- | | | |
| 1- | | | |
| 1 | | | |
| Homo_ | chr1: | GGCTCCATAGCTCAGTGGTTAGAGCACTGG | 534 |
| sapiens_ | 222465005- | TCTTGTAAACCAGGGGTCGCGAGTTCGATC | |
| tRNA- | 222465077 | CTCGCTGGGGCCT | |
| Thr- | (+) | | |
| TGT- | | | |
| 2- | | | |
| 1 | | | |
| Homo_ | chr14: | GGCTCCATAGCTCAGGGGTTAGAGCGCTGG | 535 |
| sapiens_ | 20613790- | TCTTGTAAACCAGGGGTCGCGAGTTCAATT | |
| tRNA- | 20613862 | CTCGCTGGGGCCT | |
| Thr- | (−) | | |
| TGT- | | | |
| 3- | | | |
| 1 | | | |
| Homo_ | chr14: | GGCTCCATAGCTCAGGGGTTAGAGCACTGG | 536 |
| sapiens_ | 20631160- | TCTTGTAAACCAGGGGTCGCGAGTTCAAAT | |
| tRNA- | 20631232 | CTCGCTGGGGCCT | |
| Thr- | (−) | | |
| TGT- | | | |
| 4- | | | |
| 1 | | | |
| Homo_ | chr14: | GGCCCTATAGCTCAGGGGTTAGAGCACTGG | 537 |
| sapiens_ | 20681690- | TCTTGTAAACCAGGGGTCGCGAGTTCAAAT | |
| tRNA- | 20681762 | CTCGCTGGGGCCT | |
| Thr- | (+) | | |
| TGT- | | | |
| 5- | | | |
| 1 | | | |
| Homo_ | chr5: | GGCTCCATAGCTCAGGGGTTAGAGCACTGG | 538 |
| sapiens_ | 181191687- | TCTTGTAAACCAGGGTCGCGAGTTCAAATC | |
| tRNA- | 181191758 | TCGCTGGGGCCT | |
| Thr- | (−) | | |
| TGT- | | | |
| 6- | | | |
| 1 | | | |
| Homo_ | chr17: | GGCCTCGTGGCGCAACGGTAGCGCGTCTGA | 539 |
| sapiens_ | 8220869- | CTCCAGATCAGAAGGTTGCGTGTTCAAATC | |
| tRNA- | 8220940 | ACGTCGGGGTCA | |
| Trp- | (−) | | |
| CCA- | | | |
| 1- | | | |
| 1 | | | |
| Homo_ | chr17: | GACCTCGTGGCGCAATGGTAGCGCGTCTGA | 540 |
| sapiens_ | 19508181- | CTCCAGATCAGAAGGTTGCGTGTTCAAGTC | |
| tRNA- | 19508252 | ACGTCGGGGTCA | |
| Trp- | (+) | | |
| CCA- | | | |
| 2- | | | |
| 1 | | | |
| Homo_ | chr6: | GACCTCGTGGCGCAACGGTAGCGCGTCTGA | 541 |
| sapiens_ | 26319102- | CTCCAGATCAGAAGGTTGCGTGTTCAAATC | |
| tRNA- | 26319173 | ACGTCGGGGTCA | |
| Trp- | (−) | | |
| CCA- | | | |
| 3- | | | |
| 1 | | | |
| Homo_ | chr6: | GACCTCGTGGCGCAACGGTAGCGCGTCTGA | 542 |
| sapiens_ | 26331444- | CTCCAGATCAGAAGGTTGCGTGTTCAAATC | |
| tRNA- | 26331515 | ACGTCGGGGTCA | |
| Trp- | (−) | | |
| CCA- | | | |
| 3- | | | |
| 2 | | | |
| Homo_ | chr17: | GACCTCGTGGCGCAACGGTAGCGCGTCTGA | 543 |
| sapiens_ | 8186358- | CTCCAGATCAGAAGGTTGCGTGTTCAAATC | |
| tRNA- | 8186429 | ACGTCGGGGTCA | |
| Trp- | (+) | | |
| CCA- | | | |
| 3- | | | |
| 3 | | | |
| Homo_ | chr12: | GACCTCGTGGCGCAACGGTAGCGCGTCTGA | 544 |
| sapiens_ | 98504252- | CTCCAGATCAGAAGGCTGCGTGTTCGAATC | |
| tRNA- | 98504323 | ACGTCGGGGTCA | |
| Trp- | (+) | | |
| CCA- | | | |
| 4- | | | |
| 1 | | | |
| Homo_ | chr7: | GACCTCGTGGCGCAACGGCAGCGCGTCTGA | 545 |
| sapiens_ | 99469684- | CTCCAGATCAGAAGGTTGCGTGTTCAAATC | |
| tRNA- | 99469755 | ACGTCGGGGTCA | |
| Trp- | (+) | | |
| CCA- | | | |
| 5- | | | |
| 1 | | | |
| Homo_ | chr2: | CCTTCAATAGTTCAGCTGGTAGAGCAGAGG | 546 |
| sapiens_ | 218245826- | ACTATAGCTACTTCCTCAGTAGGAGACGTC | |
| tRNA- | 218245918 | CTTAGGTTGCTGGTTCGATTCCAGCTTGAA | |
| Tyr- | (+) | GGA | |
| ATA- | | | |
| 1- | | | |
| 1 | | | |
| Homo_ | chr6: | CCTTCGATAGCTCAGTTGGTAGAGCGGAGG | 547 |
| sapiens_ | 26568858- | ACTGTAGTTGGCTGTGTCCTTAGACATCCT | |
| tRNA- | 26568948 | TAGGTCGCTGGTTCGAATCCGGCTCGAAGG | |
| Tyr- | (+) | A | |
| GTA- | | | |
| 1- | | | |
| 1 | | | |
| Homo_ | chr2: | CCTTCGATAGCTCAGTTGGTAGAGCGGAGG | 548 |
| sapiens_ | 27050782- | ACTGTAGTGGATAGGGCGTGGCAATCCTTA | |
| tRNA- | 27050870 | GGTCGCTGGTTCGATTCCGGCTCGAAGGA | |
| Tyr- | (+) | | |
| GTA- | | | |
| 2- | | | |
| 1 | | | |
| Homo_ | chr6: | CCTTCGATAGCTCAGTTGGTAGAGCGGAGG | 549 |
| sapiens_ | 26577104- | ACTGTAGGCTCATTAAGCAAGGTATCCTTA | |
| tRNA- | 26577192 | GGTCGCTGGTTCGAATCCGGCTCGGAGGA | |
| Tyr- | (+) | | |
| GTA- | | | |
| 3- | | | |
| 1 | | | |
| Homo_ | chr14: | CCTTCGATAGCTCAGCTGGTAGAGCGGAGG | 550 |
| sapiens_ | 20657464- | ACTGTAGATTGTATAGACATTTGCGGACAT | |
| tRNA- | 20657557 | CCTTAGGTCGCTGGTTCGATTCCAGCTCGA | |
| Tyr- | (−) | AGGA | |
| GTA- | | | |
| 4- | | | |
| 1 | | | |
| Homo_ | chr8: | CCTTCGATAGCTCAGCTGGTAGAGCGGAGG | 551 |
| sapiens_ | 66113367- | ACTGTAGCTACTTCCTCAGCAGGAGACATC | |
| tRNA- | 66113459+) | CTTAGGTCGCTGGTTCGATTCCGGCTCGAA | |
| Tyr- | | GGA | |
| GTA- | | | |
| 5- | | | |
| 1 | | | |
| Homo_ | chr8: | CCTTCGATAGCTCAGCTGGTAGAGCGGAGG | 552 |
| sapiens_ | 66113988- | ACTGTAGGCGCGCGCCCGTGGCCATCCTTA | |
| tRNA- | 66114076 | GGTCGCTGGTTCGATTCCGGCTCGAAGGA | |
| Tyr- | | | |
| GTA- | | | |
| 5- | | | |
| 2 | | | |
| Homo_ | chr14: | CCTTCGATAGCTCAGCTGGTAGAGCGGAGG | 553 |
| sapiens_ | 20653099- | ACTGTAGCCTGTAGAAACATTTGTGGACAT | |
| tRNA- | 20653192 | CCTTAGGTCGCTGGTTCGATTCCGGCTCGA | |
| Tyr- | (−) | AGGA | |
| GTA- | | | |
| 5- | | | |
| 3 | | | |
| Homo_ | chr14: | CCTTCGATAGCTCAGCTGGTAGAGCGGAGG | 554 |
| sapiens_ | 20663192- | ACTGTAGATTGTACAGACATTTGCGGACAT | |
| tRNA- | 206632850 | CCTTAGGTCGCTGGTTCGATTCCGGCTCGA | |
| Tyr- | | AGGA | |
| GTA- | | | |
| 5- | | | |
| 4 | | | |
| Homo_ | chr14: | CCTTCGATAGCTCAGCTGGTAGAGCGGAGG | 555 |
| sapiens_ | 20683273- | ACTGTAGTACTTAATGTGTGGTCATCCTTA | |
| tRNA- | 20683361 | GGTCGCTGGTTCGATTCCGGCTCGAAGGA | |
| Tyr- | | | |
| GTA- | | | |
| 5- | | | |
| 5 | | | |
| Homo_ | chr6: | CCTTCGATAGCTCAGCTGGTAGAGCGGAGG | 556 |
| sapiens_ | 26594874- | ACTGTAGGGGTTTGAATGTGGTCATCCTTA | |
| tRNA- | 26594962 | GGTCGCTGGTTCGAATCCGGCTCGGAGGA | |
| Tyr- | (+) | | |
| GTA- | | | |
| 6- | | | |
| 1 | | | |
| Homo_ | chr14: | CCTTCGATAGCTCAGCTGGTAGAGCGGAGG | 557 |
| sapiens_ | 20659958- | ACTGTAGACTGCGGAAACGTTTGTGGACAT | |
| tRNA- | 20660051 | CCTTAGGTCGCTGGTTCAATTCCGGCTCGA | |
| Tyr- | (−) | AGGA | |
| GTA- | | | |
| 7- | | | |
| 1 | | | |
| Homo_ | chr6: | CTTTCGATAGCTCAGTTGGTAGAGCGGAGG | 558 |
| sapiens_ | 26575570- | ACTGTAGGTTCATTAAACTAAGGCATCCTT | |
| tRNA- | 26575659 | AGGTCGCTGGTTCGAATCCGGCTCGAAGGA | |
| Tyr- | | | |
| GTA- | | | |
| 8- | | | |
| 1 | | | |
| Homo_ | chr8: | TCTTCAATAGCTCAGCTGGTAGAGCGGAGG | 559 |
| sapiens_ | 65697297- | ACTGTAGGTGCACGCCCGTGGCCATTCTTA | |
| tRNA- | 65697384 | GGTGCTGGTTTGATTCCGACTTGGAGAG | |
| Tyr- | (−) | | |
| GTA- | | | |
| 9- | | | |
| 1 | | | |
| Homo_ | chr3: | GTTTCCGTAGTGTAGTGGTTATCACGTTCG | 560 |
| sapiens_ | 169772230- | CCTAACACGCGAAAGGTCCCCGGTTCGAAA | |
| tRNA- | 169772302 | CCGGGCGGAAACA | |
| Val- | (+) | | |
| AAC- | | | |
| 1- | | | |
| 1 | | | |
| Homo_ | chr5: | GTTTCCGTAGTGTAGTGGTTATCACGTTCG | 561 |
| sapiens_ | 181164154- | CCTAACACGCGAAAGGTCCCCGGTTCGAAA | |
| tRNA- | 181164226 | CCGGGCGGAAACA | |
| Val- | (+) | | |
| AAC- | | | |
| 1- | | | |
| 2 | | | |
| Homo_ | chr5: | GTTTCCGTAGTGTAGTGGTTATCACGTTCG | 562 |
| sapiens_ | 181169610- | CCTAACACGCGAAAGGTCCCCGGTTCGAAA | |
| tRNA- | 181169682 | CCGGGCGGAAACA | |
| Val- | (+) | | |
| AAC- | | | |
| 1- | | | |
| 3 | | | |
| Homo_ | chr5: | GTTTCCGTAGTGTAGTGGTTATCACGTTCG | 563 |
| sapiens_ | 181218270- | CCTAACACGCGAAAGGTCCCCGGTTCGAAA | |
| tRNA- | 181218342 | CCGGGCGGAAACA | |
| Val- | (−) | | |
| AAC- | | | |
| 1- | | | |
| 4 | | | |
| Homo_ | chr6: | GTTTCCGTAGTGTAGTGGTTATCACGTTCG | 564 |
| sapiens_ | 27753400- | CCTAACACGCGAAAGGTCCCCGGTTCGAAA | |
| tRNA- | 27753472 | CCGGGCGGAAACA | |
| Val- | (−) | | |
| AAC- | | | |
| 1- | | | |
| 5 | | | |
| Homo_ | chr5: | GTTTCCGTAGTGTAGTGGTCATCACGTTCG | 565 |
| sapiens_ | 181188416- | CCTAACACGCGAAAGGTCCCCGGTTCGAAA | |
| tRNA- | 181188488 | CCGGGCGGAAACA | |
| Val- | (−) | | |
| AAC- | | | |
| 2- | | | |
| 1 | | | |
| Homo_ | chr6: | GTTTCCGTAGTGTAGTGGTTATCACGTTCG | 566 |
| sapiens_ | 27650928- | CCTAACACGCGAAAGGTCCCTGGATCAAAA | |
| tRNA- | 27651000 | CCAGGCGGAAACA | |
| Val- | (−) | | |
| AAC- | | | |
| 3- | | | |
| 1 | | | |
| Homo_ | chr6: | GTTTCCGTAGTGTAGTGGTTATCACGTTCG | 567 |
| sapiens_ | 27681106- | CCTAACACGCGAAAGGTCCGCGGTTCGAAA | |
| tRNA- | 27681178 | CCGGGCGGAAACA | |
| Val- | (−) | | |
| AAC- | | | |
| 4- | | | |
| 1 | | | |
| Homo_ | chr6: | GTTTCCGTAGTGTAGTGGTTATCACGTTTG | 568 |
| sapiens_ | 27235509- | CCTAACACGCGAAAGGTCCCCGGTTCGAAA | |
| tRNA- | 27235581 | CCGGGCAGAAACA | |
| Val- | (+) | | |
| AAC- | | | |
| 5- | | | |
| 1 | | | |
| Homo_ | chr6: | GGGGGTGTAGCTCAGTGGTAGAGCGTATGC | 569 |
| sapiens_ | 28735429- | TTAACATTCATGAGGCTCTGGGTTCGATCC | |
| tRNA- | 28735500 | CCAGCACTTCCA | |
| Val- | (−) | | |
| AAC- | | | |
| 6- | | | |
| 1 | | | |
| Homo_ | chr1: | GTTTCCGTAGTGTAGTGGTTATCACGTTCG | 570 |
| sapiens_ | 161399700- | CCTCACACGCGAAAGGTCCCCGGTTCGAAA | |
| tRNA- | 161399772 | CCGGGCGGAAACA | |
| Val- | (−) | | |
| CAC- | | | |
| 1- | | | |
| 1 | | | |
| Homo_ | chr5: | GTTTCCGTAGTGTAGTGGTTATCACGTTCG | 571 |
| sapiens_ | 181097070- | CCTCACACGCGAAAGGTCCCCGGTTCGAAA | |
| tRNA- | 181097142 | CCGGGCGGAAACA | |
| Val- | (+) | | |
| CAC- | | | |
| 1- | | | |
| 2 | | | |
| Homo_ | chr5: | GTTTCCGTAGTGTAGTGGTTATCACGTTCG | 572 |
| sapiens_ | 181102253- | CCTCACACGCGAAAGGTCCCCGGTTCGAAA | |
| tRNA- | 181102325 | CCGGGCGGAAACA | |
| Val- | (−) | | |
| CAC- | | | |
| 1- | | | |
| 3 | | | |
| Homo_ | chr5: | GTTTCCGTAGTGTAGTGGTTATCACGTTCG | 573 |
| sapiens_ | 181173650- | CCTCACACGCGAAAGGTCCCCGGTTCGAAA | |
| tRNA- | 181173722 | CCGGGCGGAAACA | |
| Val- | (+) | | |
| CAC- | | | |
| 1- | | | |
| 4 | | | |
| Homo_ | chr5: | GTTTCCGTAGTGTAGTGGTTATCACGTTCG | 574 |
| sapiens_ | 181222395- | CCTCACACGCGAAAGGTCCCCGGTTCGAAA | |
| tRNA- | 181222467 | CCGGGCGGAAACA | |
| Val- | (−) | | |
| CAC- | | | |
| 1- | | | |
| 5 | | | |
| Homo_ | chr6: | GTTTCCGTAGTGTAGTGGTTATCACGTTCG | 575 |
| sapiens_ | 26538054- | CCTCACACGCGAAAGGTCCCCGGTTCGAAA | |
| tRNA- | 26538126 | CCGGGCGGAAACA | |
| Val- | (+) | | |
| CAC- | | | |
| 1- | | | |
| 6 | | | |
| Homo_ | chr1: | GTTTCCGTAGTGTAGTGGTTATCACGTTCG | 576 |
| sapiens_ | 149712552- | CCTCACACGCGAAAGGTCCCCGGTTCGAAA | |
| tRNA- | 149712624 | CCGGGCGGAAACA | |
| Val- | (−) | | |
| CAC- | | | |
| 1- | | | |
| 7 | | | |
| Homo_ | chr1: | GTTTCCGTAGTGTAGTGGTTATCATGTTCG | 577 |
| sapiens_ | 145157157- | CCTCACACGCGAAAGGTCCCCGGTTCGAAA | |
| tRNA- | 145157229 | CTGGATGGAAACA | |
| Val- | (+) | | |
| CAC- | | | |
| 14- | | | |
| 1 | | | |
| Homo_ | chr6: | GCTTCTGTAGTGTAGTGGTTATCACGTTCG | 578 |
| sapiens_ | 27280270- | CCTCACACGCGAAAGGTCCCCGGTTCGAAA | |
| tRNA- | 27280342 | CCGGGCAGAAGCA | |
| Val- | (−) | | |
| CAC- | | | |
| 2- | | | |
| 1 | | | |
| Homo_ | chr19: | GTTTCCGTAGTGTAGCGGTTATCACATTCG | 579 |
| sapiens_ | 4724635- | CCTCACACGCGAAAGGTCCCCGGTTCGATC | |
| tRNA- | 4724707 | CCGGGCGGAAACA | |
| Val- | (−) | | |
| CAC- | | | |
| 3- | | | |
| 1 | | | |
| Homo_ | chr1: | GTTTCCGTAGTGTAGTGGTTATCACGTTCG | 580 |
| sapiens_ | 143803994- | CCTCACACGCGAAAGGTCCCCGGTTCGAAA | |
| tRNA- | 143804066 | CTGGGCGGAAACA | |
| Val- | (−) | | |
| CAC- | | | |
| 4- | | | |
| 1 | | | |
| Homo_ | chr1: | GTTTCCGTAGTGTAGTGGTTATCACGTTCG | 581 |
| sapiens_ | 121020729- | CCTCACACGCGAAAGGTCCCCGGTTCGAAA | |
| tRNA- | 121020801 | CCGGGCGGAAACA | |
| Val- | (−) | | |
| CAC- | | | |
| 5- | | | |
| 1 | | | |
| Homo_ | chr6: | GTTTCCGTAGTGGAGTGGTTATCACGTTCG | 582 |
| sapiens_ | 27206088- | CCTCACACGCGAAAGGTCCCCGGTTTGAAA | |
| tRNA- | 27206160 | CCAGGCGGAAACA | |
| Val- | (−) | | |
| CAC- | | | |
| 6- | | | |
| 1 | | | |
| Homo_ | chr11: | GGTTCCATAGTGTAGTGGTTATCACGTCTG | 583 |
| sapiens_ | 59550629- | CTTTACACGCAGAAGGTCCTGGGTTCGAGC | |
| tRNA- | 59550701 | CCCAGTGGAACCA | |
| Val- | (−) | | |
| TAC- | | | |
| 1- | | | |
| 1 | | | |
| Homo_ | chrX: | GGTTCCATAGTGTAGTGGTTATCACGTCTG | 584 |
| sapiens_ | 18674909- | CTTTACACGCAGAAGGTCCTGGGTTCGAGC | |
| tRNA- | 18674981 | CCCAGTGGAACCA | |
| Val- | (−) | | |
| TAC- | | | |
| 1- | | | |
| 2 | | | |
| Homo_ | chr11: | GGTTCCATAGTGTAGCGGTTATCACGTCTG | 585 |
| sapiens_ | 59550987- | CTTTACACGCAGAAGGTCCTGGGTTCGAGC | |
| tRNA- | 59551059 | CCCAGTGGAACCA | |
| Val- | (−) | | |
| TAC- | | | |
| 2- | | | |
| 1 | | | |
| Homo_ | chr10: | GGTTCCATAGTGTAGTGGTTATCACATCTG | 586 |
| sapiens_ | 5853711- | CTTTACACGCAGAAGGTCCTGGGTTCAAGC | |
| tRNA- | 5853783 | CCCAGTGGAACCA | |
| Val- | (−) | | |
| TAC- | | | |
| 3- | | | |
| 1 | | | |
| Homo_ | chr6: | GTTTCCGTGGTGTAGTGGTTATCACATTCG | 587 |
| sapiens_ | 27290626- | CCTTACACGCGAAAGGTCCTCGGGTCGAAA | |
| tRNA- | 27290698 | CCGAGCGGAAACA | |
| Val- | (+) | | |
| TAC- | | | |
| 4- | | | |
| 1 | | | |
| Homo_ | chr1: | AGCAGAGTGGCGCAGCGGAAGCGTGCTGGG | 588 |
| sapiens_ | 153671250- | CCCATAACCCAGAGGTCGATGGATCGAAAC | |
| tRNA- | 153671321 | CATCCTCTGCTA | |
| iMet- | (+) | | |
| CAT- | | | |
| 1- | | | |
| 1 | | | |
| Homo_ | chr6: | AGCAGAGTGGCGCAGCGGAAGCGTGCTGGG | 589 |
| sapiens_ | 26286526- | CCCATAACCCAGAGGTCGATGGATCGAAAC | |
| tRNA- | 26286597 | CATCCTCTGCTA | |
| iMet- | (+) | | |
| CAT- | | | |
| 1- | | | |
| 2 | | | |
| Homo_ | chr6: | AGCAGAGTGGCGCAGCGGAAGCGTGCTGGG | 590 |
| sapiens_ | 26313124- | CCCATAACCCAGAGGTCGATGGATCGAAAC | |
| tRNA- | 26313195 | CATCCTCTGCTA | |
| iMet- | | | |
| CAT- | | | |
| 1- | | | |
| 3 | | | |
| Homo_ | chr6: | AGCAGAGTGGCGCAGCGGAAGCGTGCTGGG | 591 |
| sapiens_ | 26330301- | CCCATAACCCAGAGGTCGATGGATCGAAAC | |
| tRNA- | 26330372 | CATCCTCTGCTA | |
| iMet- | (−) | | |
| CAT- | | | |
| 1- | | | |
| 4 | | | |
| Homo_ | chr6: | AGCAGAGTGGCGCAGCGGAAGCGTGCTGGG | 592 |
| sapiens_ | 27332985- | CCCATAACCCAGAGGTCGATGGATCGAAAC | |
| tRNA- | 27333056 | CATCCTCTGCTA | |
| iMet- | (−) | | |
| CAT- | | | |
| 1- | | | |
| 5 | | | |
| Homo_ | chr6: | AGCAGAGTGGCGCAGCGGAAGCGTGCTGGG | 593 |
| sapiens_ | 27592821- | CCCATAACCCAGAGGTCGATGGATCGAAAC | |
| tRNA- | 27592892 | CATCCTCTGCTA | |
| iMet- | (−) | | |
| CAT- | | | |
| 1- | | | |
| 6 | | | |
| Homo_ | chr6: | AGCAGAGTGGCGCAGCGGAAGCGTGCTGGG | 594 |
| sapiens_ | 27902493- | CCCATAACCCAGAGGTCGATGGATCGAAAC | |
| tRNA- | 27902564 | CATCCTCTGCTA | |
| iMet- | (−) | | |
| CAT- | | | |
| 1- | | | |
| 7 | | | |
| Homo_ | chr17: | AGCAGAGTGGCGCAGCGGAAGCGTGCTGGG | 595 |
| sapiens_ | 82494721- | CCCATAACCCAGAGGTCGATGGATCGAAAC | |
| tRNA- | 82494792 | CATCCTCTGCTA | |
| iMet- | (−) | | |
| CAT- | | | |
| 1- | | | |
| 8 | | | |
| Homo_ | chr6: | AGCAGAGTGGCGCAGCGGAAGCGTGCTGGG | 596 |
| sapiens_ | 27777885- | CCCATAACCCAGAGGTCGATGGATCTAAAC | |
| tRNA- | 27777956 | CATCCTCTGCTA | |
| iMet- | (+) | | |
| CAT- | | | |
| 2- | | | |
| 1 | | | |

TABLE 2
Exemplary embodiments of possible human tRNA genes, relevant
protospacer sequences and the respective base editor capable of installing a
single transition mutation or single transversion mutation to convert the
endogenous tRNA anticodon into a nonsense suppressor anticodon.

| | | | SEQ ID |
|---|---|---|---|
| tRNA Target | Protospacer | Editor | NO: |
| Homo_sapiens_tRNA- | AAGTCAGACGCCTTATCCAT | CBE | 597 |
| Arg-TCG-1-1 | | | |
| Homo_sapiens_tRNA- | GAAGTCAGACGCCTTATCCA | CBE | 598 |
| Arg-TCG-1-1 | | | |
| Homo_sapiens_tRNA- | CGAAGTCAGACGCCTTATCC | CBE | 599 |
| Arg-TCG-1-1 | | | |
| Homo_sapiens_tRNA- | CCGAAGTCAGACGCCTTATC | CBE | 600 |
| Arg-TCG-1-1 | | | |
| Homo_sapiens_tRNA- | TCCGAAGTCAGACGCCTTAT | CBE | 601 |
| Arg-TCG-1-1 | | | |
| Homo_sapiens_tRNA- | ATCCGAAGTCAGACGCCTTA | CBE | 602 |
| Arg-TCG-1-1 | | | |
| Homo_sapiens_tRNA- | GATCCGAAGTCAGACGCCTT | CBE | 603 |
| Arg-TCG-1-1 | | | |
| Homo_sapiens_tRNA- | TGATCCGAAGTCAGACGCCT | CBE | 604 |
| Arg-TCG-1-1 | | | |
| Homo_sapiens_tRNA- | CTGATCCGAAGTCAGACGCC | CBE | 605 |
| Arg-TCG-1-1 | | | |
| Homo_sapiens_tRNA- | TCTGATCCGAAGTCAGACGC | CBE | 606 |
| Arg-TCG-1-1 | | | |
| Homo_sapiens_tRNA- | TTCTGATCCGAAGTCAGACG | CBE | 607 |
| Arg-TCG-1-1 | | | |
| Homo_sapiens_tRNA- | CTTCTGATCCGAAGTCAGAC | CBE | 608 |
| Arg-TCG-1-1 | | | |
| Homo_sapiens_tRNA- | TCTTCTGATCCGAAGTCAGA | CBE | 609 |
| Arg-TCG-1-1 | | | |
| Homo_sapiens_tRNA- | ATCTTCTGATCCGAAGTCAG | CBE | 610 |
| Arg-TCG-1-1 | | | |
| Homo_sapiens_tRNA- | AATCTTCTGATCCGAAGTCA | CBE | 611 |
| Arg-TCG-1-1 | | | |
| Homo_sapiens_tRNA- | CAATCTTCTGATCCGAAGTC | CBE | 612 |
| Arg-TCG-1-1 | | | |
| Homo_sapiens_tRNA- | GCAATCTTCTGATCCGAAGT | CBE | 613 |
| Arg-TCG-1-1 | | | |
| Homo_sapiens_tRNA- | TGCAATCTTCTGATCCGAAG | CBE | 614 |
| Arg-TCG-1-1 | | | |
| Homo_sapiens_tRNA- | AAGTCAGACGCCTTATCCAT | CBE | 615 |
| Arg-TCG-2-1 | | | |
| Homo_sapiens_tRNA- | GAAGTCAGACGCCTTATCCA | CBE | 616 |
| Arg-TCG-2-1 | | | |
| Homo_sapiens_tRNA- | CGAAGTCAGACGCCTTATCC | CBE | 617 |
| Arg-TCG-2-1 | | | |
| Homo_sapiens_tRNA- | CCGAAGTCAGACGCCTTATC | CBE | 618 |
| Arg-TCG-2-1 | | | |
| Homo_sapiens_tRNA- | TCCGAAGTCAGACGCCTTAT | CBE | 619 |
| Arg-TCG-2-1 | | | |
| Homo_sapiens_tRNA- | ATCCGAAGTCAGACGCCTTA | CBE | 620 |
| Arg-TCG-2-1 | | | |
| Homo_sapiens_tRNA- | GATCCGAAGTCAGACGCCTT | CBE | 621 |
| Arg-TCG-2-1 | | | |
| Homo_sapiens_tRNA- | TGATCCGAAGTCAGACGCCT | CBE | 622 |
| Arg-TCG-2-1 | | | |
| Homo_sapiens_tRNA- | CTGATCCGAAGTCAGACGCC | CBE | 623 |
| Arg-TCG-2-1 | | | |
| Homo_sapiens_tRNA- | TCTGATCCGAAGTCAGACGC | CBE | 624 |
| Arg-TCG-2-1 | | | |
| Homo_sapiens_tRNA- | TTCTGATCCGAAGTCAGACG | CBE | 625 |
| Arg-TCG-2-1 | | | |
| Homo_sapiens_tRNA- | CTTCTGATCCGAAGTCAGAC | CBE | 626 |
| Arg-TCG-2-1 | | | |
| Homo_sapiens_tRNA- | TCTTCTGATCCGAAGTCAGA | CBE | 627 |
| Arg-TCG-2-1 | | | |
| Homo_sapiens_tRNA- | ATCTTCTGATCCGAAGTCAG | CBE | 628 |
| Arg-TCG-2-1 | | | |
| Homo_sapiens_tRNA- | AATCTTCTGATCCGAAGTCA | CBE | 629 |
| Arg-TCG-2-1 | | | |
| Homo_sapiens_tRNA- | CAATCTTCTGATCCGAAGTC | CBE | 630 |
| Arg-TCG-2-1 | | | |
| Homo_sapiens_tRNA- | TCAATCTTCTGATCCGAAGT | CBE | 631 |
| Arg-TCG-2-1 | | | |
| Homo_sapiens_tRNA- | CTCAATCTTCTGATCCGAAG | CBE | 632 |
| Arg-TCG-2-1 | | | |
| Homo_sapiens_tRNA- | AAGTCAGACGCCTTATCCAT | CBE | 633 |
| Arg-TCG-3-1 | | | |
| Homo_sapiens_tRNA- | GAAGTCAGACGCCTTATCCA | CBE | 634 |
| Arg-TCG-3-1 | | | |
| Homo_sapiens_tRNA- | CGAAGTCAGACGCCTTATCC | CBE | 635 |
| Arg-TCG-3-1 | | | |
| Homo_sapiens_tRNA- | CCGAAGTCAGACGCCTTATC | CBE | 636 |
| Arg-TCG-3-1 | | | |
| Homo_sapiens_tRNA- | TCCGAAGTCAGACGCCTTAT | CBE | 637 |
| Arg-TCG-3-1 | | | |
| Homo_sapiens_tRNA- | ATCCGAAGTCAGACGCCTTA | CBE | 638 |
| Arg-TCG-3-1 | | | |
| Homo_sapiens_tRNA- | GATCCGAAGTCAGACGCCTT | CBE | 639 |
| Arg-TCG-3-1 | | | |
| Homo_sapiens_tRNA- | TGATCCGAAGTCAGACGCCT | CBE | 640 |
| Arg-TCG-3-1 | | | |
| Homo_sapiens_tRNA- | CTGATCCGAAGTCAGACGCC | CBE | 641 |
| Arg-TCG-3-1 | | | |
| Homo_sapiens_tRNA- | TCTGATCCGAAGTCAGACGC | CBE | 642 |
| Arg-TCG-3-1 | | | |
| Homo_sapiens_tRNA- | TTCTGATCCGAAGTCAGACG | CBE | 643 |
| Arg-TCG-3-1 | | | |
| Homo_sapiens_tRNA- | CTTCTGATCCGAAGTCAGAC | CBE | 644 |
| Arg-TCG-3-1 | | | |
| Homo_sapiens_tRNA- | TCTTCTGATCCGAAGTCAGA | CBE | 645 |
| Arg-TCG-3-1 | | | |
| Homo_sapiens_tRNA- | ATCTTCTGATCCGAAGTCAG | CBE | 646 |
| Arg-TCG-3-1 | | | |
| Homo_sapiens_tRNA- | AATCTTCTGATCCGAAGTCA | CBE | 647 |
| Arg-TCG-3-1 | | | |
| Homo_sapiens_tRNA- | CAATCTTCTGATCCGAAGTC | CBE | 648 |
| Arg-TCG-3-1 | | | |
| Homo_sapiens_tRNA- | TCAATCTTCTGATCCGAAGT | CBE | 649 |
| Arg-TCG-3-1 | | | |
| Homo_sapiens_tRNA- | CTCAATCTTCTGATCCGAAG | CBE | 650 |
| Arg-TCG-3-1 | | | |
| Homo_sapiens_tRNA- | AAGTCAGACGCCTTATCCAT | CBE | 651 |
| Arg-TCG-4-1 | | | |
| Homo_sapiens_tRNA- | GAAGTCAGACGCCTTATCCA | CBE | 652 |
| Arg-TCG-4-1 | | | |
| Homo_sapiens_tRNA- | CGAAGTCAGACGCCTTATCC | CBE | 653 |
| Arg-TCG-4-1 | | | |
| Homo_sapiens_tRNA- | CCGAAGTCAGACGCCTTATC | CBE | 654 |
| Arg-TCG-4-1 | | | |
| Homo_sapiens_tRNA- | TCCGAAGTCAGACGCCTTAT | CBE | 655 |
| Arg-TCG-4-1 | | | |
| Homo_sapiens_tRNA- | ATCCGAAGTCAGACGCCTTA | CBE | 656 |
| Arg-TCG-4-1 | | | |
| Homo_sapiens_tRNA- | GATCCGAAGTCAGACGCCTT | CBE | 657 |
| Arg-TCG-4-1 | | | |
| Homo_sapiens_tRNA- | TGATCCGAAGTCAGACGCCT | CBE | 658 |
| Arg-TCG-4-1 | | | |
| Homo_sapiens_tRNA- | CTGATCCGAAGTCAGACGCC | CBE | 659 |
| Arg-TCG-4-1 | | | |
| Homo_sapiens_tRNA- | TCTGATCCGAAGTCAGACGC | CBE | 660 |
| Arg-TCG-4-1 | | | |
| Homo_sapiens_tRNA- | TTCTGATCCGAAGTCAGACG | CBE | 661 |
| Arg-TCG-4-1 | | | |
| Homo_sapiens_tRNA- | CTTCTGATCCGAAGTCAGAC | CBE | 662 |
| Arg-TCG-4-1 | | | |
| Homo_sapiens_tRNA- | TCTTCTGATCCGAAGTCAGA | CBE | 663 |
| Arg-TCG-4-1 | | | |
| Homo_sapiens_tRNA- | ATCTTCTGATCCGAAGTCAG | CBE | 664 |
| Arg-TCG-4-1 | | | |
| Homo_sapiens_tRNA- | AATCTTCTGATCCGAAGTCA | CBE | 665 |
| Arg-TCG-4-1 | | | |
| Homo_sapiens_tRNA- | CAATCTTCTGATCCGAAGTC | CBE | 666 |
| Arg-TCG-4-1 | | | |
| Homo_sapiens_tRNA- | TCAATCTTCTGATCCGAAGT | CBE | 667 |
| Arg-TCG-4-1 | | | |
| Homo_sapiens_tRNA- | CTCAATCTTCTGATCCGAAG | CBE | 668 |
| Arg-TCG-4-1 | | | |
| Homo_sapiens_tRNA- | AAGTCAGACGCCTTATCCAT | CBE | 669 |
| Arg-TCG-5-1 | | | |
| Homo_sapiens_tRNA- | GAAGTCAGACGCCTTATCCA | CBE | 670 |
| Arg-TCG-5-1 | | | |
| Homo_sapiens_tRNA- | CGAAGTCAGACGCCTTATCC | CBE | 671 |
| Arg-TCG-5-1 | | | |
| Homo_sapiens_tRNA- | CCGAAGTCAGACGCCTTATC | CBE | 672 |
| Arg-TCG-5-1 | | | |
| Homo_sapiens_tRNA- | TCCGAAGTCAGACGCCTTAT | CBE | 673 |
| Arg-TCG-5-1 | | | |
| Homo_sapiens_tRNA- | ATCCGAAGTCAGACGCCTTA | CBE | 674 |
| Arg-TCG-5-1 | | | |
| Homo_sapiens_tRNA- | GATCCGAAGTCAGACGCCTT | CBE | 675 |
| Arg-TCG-5-1 | | | |
| Homo_sapiens_tRNA- | TGATCCGAAGTCAGACGCCT | CBE | 676 |
| Arg-TCG-5-1 | | | |
| Homo_sapiens_tRNA- | CTGATCCGAAGTCAGACGCC | CBE | 677 |
| Arg-TCG-5-1 | | | |
| Homo_sapiens_tRNA- | TCTGATCCGAAGTCAGACGC | CBE | 678 |
| Arg-TCG-5-1 | | | |
| Homo_sapiens_tRNA- | TTCTGATCCGAAGTCAGACG | CBE | 679 |
| Arg-TCG-5-1 | | | |
| Homo_sapiens_tRNA- | CTTCTGATCCGAAGTCAGAC | CBE | 680 |
| Arg-TCG-5-1 | | | |
| Homo_sapiens_tRNA- | TCTTCTGATCCGAAGTCAGA | CBE | 681 |
| Arg-TCG-5-1 | | | |
| Homo_sapiens_tRNA- | ATCTTCTGATCCGAAGTCAG | CBE | 682 |
| Arg-TCG-5-1 | | | |
| Homo_sapiens_tRNA- | AATCTTCTGATCCGAAGTCA | CBE | 683 |
| Arg-TCG-5-1 | | | |
| Homo_sapiens_tRNA- | CAATCTTCTGATCCGAAGTC | CBE | 684 |
| Arg-TCG-5-1 | | | |
| Homo_sapiens_tRNA- | TCAATCTTCTGATCCGAAGT | CBE | 685 |
| Arg-TCG-5-1 | | | |
| Homo_sapiens_tRNA- | CTCAATCTTCTGATCCGAAG | CBE | 686 |
| Arg-TCG-5-1 | | | |
| Homo_sapiens_tRNA- | AAGTCAGACGCCTTATCCAT | CBE | 687 |
| Arg-TCG-6-1 | | | |
| Homo_sapiens_tRNA- | GAAGTCAGACGCCTTATCCA | CBE | 688 |
| Arg-TCG-6-1 | | | |
| Homo_sapiens_tRNA- | CGAAGTCAGACGCCTTATCC | CBE | 689 |
| Arg-TCG-6-1 | | | |
| Homo_sapiens_tRNA- | CCGAAGTCAGACGCCTTATC | CBE | 690 |
| Arg-TCG-6-1 | | | |
| Homo_sapiens_tRNA- | TCCGAAGTCAGACGCCTTAT | CBE | 691 |
| Arg-TCG-6-1 | | | |
| Homo_sapiens_tRNA- | ATCCGAAGTCAGACGCCTTA | CBE | 692 |
| Arg-TCG-6-1 | | | |
| Homo_sapiens_tRNA- | GATCCGAAGTCAGACGCCTT | CBE | 693 |
| Arg-TCG-6-1 | | | |
| Homo_sapiens_tRNA- | TGATCCGAAGTCAGACGCCT | CBE | 694 |
| Arg-TCG-6-1 | | | |
| Homo_sapiens_tRNA- | TTGATCCGAAGTCAGACGCC | CBE | 695 |
| Arg-TCG-6-1 | | | |
| Homo_sapiens_tRNA- | TTTGATCCGAAGTCAGACGC | CBE | 696 |
| Arg-TCG-6-1 | | | |
| Homo_sapiens_tRNA- | TTTTGATCCGAAGTCAGACG | CBE | 697 |
| Arg-TCG-6-1 | | | |
| Homo_sapiens_tRNA- | CTTTTGATCCGAAGTCAGAC | CBE | 698 |
| Arg-TCG-6-1 | | | |
| Homo_sapiens_tRNA- | TCTTTTGATCCGAAGTCAGA | CBE | 699 |
| Arg-TCG-6-1 | | | |
| Homo_sapiens_tRNA- | ATCTTTTGATCCGAAGTCAG | CBE | 700 |
| Arg-TCG-6-1 | | | |
| Homo_sapiens_tRNA- | AATCTTTTGATCCGAAGTCA | CBE | 701 |
| Arg-TCG-6-1 | | | |
| Homo_sapiens_tRNA- | CAATCTTTTGATCCGAAGTC | CBE | 702 |
| Arg-TCG-6-1 | | | |
| Homo_sapiens_tRNA- | GCAATCTTTTGATCCGAAGT | CBE | 703 |
| Arg-TCG-6-1 | | | |
| Homo_sapiens_tRNA- | TGCAATCTTTTGATCCGAAG | CBE | 704 |
| Arg-TCG-6-1 | | | |
| Homo_sapiens_tRNA- | GCAGTCAAATGCTCTACCAC | CABE | 705 |
| Cys-GCA-1-1 | | | |
| Homo_sapiens_tRNA- | TGCAGTCAAATGCTCTACCA | CABE | 706 |
| Cys-GCA-1-1 | | | |
| Homo_sapiens_tRNA- | CTGCAGTCAAATGCTCTACC | CABE | 707 |
| Cys-GCA-1-1 | | | |
| Homo_sapiens_tRNA- | TCTGCAGTCAAATGCTCTAC | CABE | 708 |
| Cys-GCA-1-1 | | | |
| Homo_sapiens_tRNA- | ATCTGCAGTCAAATGCTCTA | CABE | 709 |
| Cys-GCA-1-1 | | | |
| Homo_sapiens_tRNA- | GATCTGCAGTCAAATGCTCT | CABE | 710 |
| Cys-GCA-1-1 | | | |
| Homo_sapiens_tRNA- | TGATCTGCAGTCAAATGCTC | CABE | 711 |
| Cys-GCA-1-1 | | | |
| Homo_sapiens_tRNA- | TTGATCTGCAGTCAAATGCT | CABE | 712 |
| Cys-GCA-1-1 | | | |
| Homo_sapiens_tRNA- | CTTGATCTGCAGTCAAATGC | CABE | 713 |
| Cys-GCA-1-1 | | | |
| Homo_sapiens_tRNA- | TCTTGATCTGCAGTCAAATG | CABE | 714 |
| Cys-GCA-1-1 | | | |
| Homo_sapiens_tRNA- | CTCTTGATCTGCAGTCAAAT | CABE | 715 |
| Cys-GCA-1-1 | | | |
| Homo_sapiens_tRNA- | CCTCTTGATCTGCAGTCAAA | CABE | 716 |
| Cys-GCA-1-1 | | | |
| Homo_sapiens_tRNA- | ACCTCTTGATCTGCAGTCAA | CABE | 717 |
| Cys-GCA-1-1 | | | |
| Homo_sapiens_tRNA- | GACCTCTTGATCTGCAGTCA | CABE | 718 |
| Cys-GCA-1-1 | | | |
| Homo_sapiens_tRNA- | GGACCTCTTGATCTGCAGTC | CABE | 719 |
| Cys-GCA-1-1 | | | |
| Homo_sapiens_tRNA- | GGGACCTCTTGATCTGCAGT | CABE | 720 |
| Cys-GCA-1-1 | | | |
| Homo_sapiens_tRNA- | AGGGACCTCTTGATCTGCAG | CABE | 721 |
| Cys-GCA-1-1 | | | |
| Homo_sapiens_tRNA- | CAGGGACCTCTTGATCTGCA | CABE | 722 |
| Cys-GCA-1-1 | | | |
| Homo_sapiens_tRNA- | GCAGTCAAATGCTCTACCCC | CABE | 723 |
| Cys-GCA-10-1 | | | |
| Homo_sapiens_tRNA- | TGCAGTCAAATGCTCTACCC | CABE | 724 |
| Cys-GCA-10-1 | | | |
| Homo_sapiens_tRNA- | CTGCAGTCAAATGCTCTACC | CABE | 725 |
| Cys-GCA-10-1 | | | |
| Homo_sapiens_tRNA- | TCTGCAGTCAAATGCTCTAC | CABE | 726 |
| Cys-GCA-10-1 | | | |
| Homo_sapiens_tRNA- | ATCTGCAGTCAAATGCTCTA | CABE | 727 |
| Cys-GCA-10-1 | | | |
| Homo_sapiens_tRNA- | GATCTGCAGTCAAATGCTCT | CABE | 728 |
| Cys-GCA-10-1 | | | |
| Homo_sapiens_tRNA- | TGATCTGCAGTCAAATGCTC | CABE | 729 |
| Cys-GCA-10-1 | | | |
| Homo_sapiens_tRNA- | TTGATCTGCAGTCAAATGCT | CABE | 730 |
| Cys-GCA-10-1 | | | |
| Homo_sapiens_tRNA- | CTTGATCTGCAGTCAAATGC | CABE | 731 |
| Cys-GCA-10-1 | | | |
| Homo_sapiens_tRNA- | TCTTGATCTGCAGTCAAATG | CABE | 732 |
| Cys-GCA-10-1 | | | |
| Homo_sapiens_tRNA- | CTCTTGATCTGCAGTCAAAT | CABE | 733 |
| Cys-GCA-10-1 | | | |
| Homo_sapiens_tRNA- | CCTCTTGATCTGCAGTCAAA | CABE | 734 |
| Cys-GCA-10-1 | | | |
| Homo_sapiens_tRNA- | ACCTCTTGATCTGCAGTCAA | CABE | 735 |
| Cys-GCA-10-1 | | | |
| Homo_sapiens_tRNA- | GACCTCTTGATCTGCAGTCA | CABE | 736 |
| Cys-GCA-10-1 | | | |
| Homo_sapiens_tRNA- | GGACCTCTTGATCTGCAGTC | CABE | 737 |
| Cys-GCA-10-1 | | | |
| Homo_sapiens_tRNA- | GGGACCTCTTGATCTGCAGT | CABE | 738 |
| Cys-GCA-10-1 | | | |
| Homo_sapiens_tRNA- | AGGGACCTCTTGATCTGCAG | CABE | 739 |
| Cys-GCA-10-1 | | | |
| Homo_sapiens_tRNA- | CAGGGACCTCTTGATCTGCA | CABE | 740 |
| Cys-GCA-10-1 | | | |
| Homo_sapiens_tRNA- | GCAGTCAAATGCTCTACCGC | CABE | 741 |
| Cys-GCA-11-1 | | | |
| Homo_sapiens_tRNA- | TGCAGTCAAATGCTCTACCG | CABE | 742 |
| Cys-GCA-11-1 | | | |
| Homo_sapiens_tRNA- | CTGCAGTCAAATGCTCTACC | CABE | 743 |
| Cys-GCA-11-1 | | | |
| Homo_sapiens_tRNA- | TCTGCAGTCAAATGCTCTAC | CABE | 744 |
| Cys-GCA-11-1 | | | |
| Homo_sapiens_tRNA- | ATCTGCAGTCAAATGCTCTA | CABE | 745 |
| Cys-GCA-11-1 | | | |
| Homo_sapiens_tRNA- | GATCTGCAGTCAAATGCTCT | CABE | 746 |
| Cys-GCA-11-1 | | | |
| Homo_sapiens_tRNA- | TGATCTGCAGTCAAATGCTC | CABE | 747 |
| Cys-GCA-11-1 | | | |
| Homo_sapiens_tRNA- | TTGATCTGCAGTCAAATGCT | CABE | 748 |
| Cys-GCA-11-1 | | | |
| Homo_sapiens_tRNA- | CTTGATCTGCAGTCAAATGC | CABE | 749 |
| Cys-GCA-11-1 | | | |
| Homo_sapiens_tRNA- | TCTTGATCTGCAGTCAAATG | CABE | 750 |
| Cys-GCA-11-1 | | | |
| Homo_sapiens_tRNA- | CTCTTGATCTGCAGTCAAAT | CABE | 751 |
| Cys-GCA-11-1 | | | |
| Homo_sapiens_tRNA- | CCTCTTGATCTGCAGTCAAA | CABE | 752 |
| Cys-GCA-11-1 | | | |
| Homo_sapiens_tRNA- | ACCTCTTGATCTGCAGTCAA | CABE | 753 |
| Cys-GCA-11-1 | | | |
| Homo_sapiens_tRNA- | GACCTCTTGATCTGCAGTCA | CABE | 754 |
| Cys-GCA-11-1 | | | |
| Homo_sapiens_tRNA- | GGACCTCTTGATCTGCAGTC | CABE | 755 |
| Cys-GCA-11-1 | | | |
| Homo_sapiens_tRNA- | GGGACCTCTTGATCTGCAGT | CABE | 756 |
| Cys-GCA-11-1 | | | |
| Homo_sapiens_tRNA- | GGGGACCTCTTGATCTGCAG | CABE | 757 |
| Cys-GCA-11-1 | | | |
| Homo_sapiens_tRNA- | CGGGGACCTCTTGATCTGCA | CABE | 758 |
| Cys-GCA-11-1 | | | |
| Homo_sapiens_tRNA- | GCAGTCAAATGCTCTACCCC | CABE | 759 |
| Cys-GCA-12-1 | | | |
| Homo_sapiens_tRNA- | TGCAGTCAAATGCTCTACCC | CABE | 760 |
| Cys-GCA-12-1 | | | |
| Homo_sapiens_tRNA- | CTGCAGTCAAATGCTCTACC | CABE | 761 |
| Cys-GCA-12-1 | | | |
| Homo_sapiens_tRNA- | TCTGCAGTCAAATGCTCTAC | CABE | 762 |
| Cys-GCA-12-1 | | | |
| Homo_sapiens_tRNA- | ATCTGCAGTCAAATGCTCTA | CABE | 763 |
| Cys-GCA-12-1 | | | |
| Homo_sapiens_tRNA- | GATCTGCAGTCAAATGCTCT | CABE | 764 |
| Cys-GCA-12-1 | | | |
| Homo_sapiens_tRNA- | TGATCTGCAGTCAAATGCTC | CABE | 765 |
| Cys-GCA-12-1 | | | |
| Homo_sapiens_tRNA- | TTGATCTGCAGTCAAATGCT | CABE | 766 |
| Cys-GCA-12-1 | | | |
| Homo_sapiens_tRNA- | TTTGATCTGCAGTCAAATGC | CABE | 767 |
| Cys-GCA-12-1 | | | |
| Homo_sapiens_tRNA- | TTTTGATCTGCAGTCAAATG | CABE | 768 |
| Cys-GCA-12-1 | | | |
| Homo_sapiens_tRNA- | CTTTTGATCTGCAGTCAAAT | CABE | 769 |
| Cys-GCA-12-1 | | | |
| Homo_sapiens_tRNA- | CCTTTTGATCTGCAGTCAAA | CABE | 770 |
| Cys-GCA-12-1 | | | |
| Homo_sapiens_tRNA- | ACCTTTTGATCTGCAGTCAA | CABE | 771 |
| Cys-GCA-12-1 | | | |
| Homo_sapiens_tRNA- | GACCTTTTGATCTGCAGTCA | CABE | 772 |
| Cys-GCA-12-1 | | | |
| Homo_sapiens_tRNA- | GGACCTTTTGATCTGCAGTC | CABE | 773 |
| Cys-GCA-12-1 | | | |
| Homo_sapiens_tRNA- | GGGACCTTTTGATCTGCAGT | CABE | 774 |
| Cys-GCA-12-1 | | | |
| Homo_sapiens_tRNA- | AGGGACCTTTTGATCTGCAG | CABE | 775 |
| Cys-GCA-12-1 | | | |
| Homo_sapiens_tRNA- | CAGGGACCTTTTGATCTGCA | CABE | 776 |
| Cys-GCA-12-1 | | | |
| Homo_sapiens_tRNA- | GCAGTCAAATGCTCTACCCC | CABE | 777 |
| Cys-GCA-13-1 | | | |
| Homo_sapiens_tRNA- | TGCAGTCAAATGCTCTACCC | CABE | 778 |
| Cys-GCA-13-1 | | | |
| Homo_sapiens_tRNA- | CTGCAGTCAAATGCTCTACC | CABE | 779 |
| Cys-GCA-13-1 | | | |
| Homo_sapiens_tRNA- | TCTGCAGTCAAATGCTCTAC | CABE | 780 |
| Cys-GCA-13-1 | | | |
| Homo_sapiens_tRNA- | ATCTGCAGTCAAATGCTCTA | CABE | 781 |
| Cys-GCA-13-1 | | | |
| Homo_sapiens_tRNA- | GATCTGCAGTCAAATGCTCT | CABE | 782 |
| Cys-GCA-13-1 | | | |
| Homo_sapiens_tRNA- | TGATCTGCAGTCAAATGCTC | CABE | 783 |
| Cys-GCA-13-1 | | | |
| Homo_sapiens_tRNA- | TTGATCTGCAGTCAAATGCT | CABE | 784 |
| Cys-GCA-13-1 | | | |
| Homo_sapiens_tRNA- | CTTGATCTGCAGTCAAATGC | CABE | 785 |
| Cys-GCA-13-1 | | | |
| Homo_sapiens_tRNA- | TCTTGATCTGCAGTCAAATG | CABE | 786 |
| Cys-GCA-13-1 | | | |
| Homo_sapiens_tRNA- | CTCTTGATCTGCAGTCAAAT | CABE | 787 |
| Cys-GCA-13-1 | | | |
| Homo_sapiens_tRNA- | CCTCTTGATCTGCAGTCAAA | CABE | 788 |
| Cys-GCA-13-1 | | | |
| Homo_sapiens_tRNA- | ACCTCTTGATCTGCAGTCAA | CABE | 789 |
| Cys-GCA-13-1 | | | |
| Homo_sapiens_tRNA- | GACCTCTTGATCTGCAGTCA | CABE | 790 |
| Cys-GCA-13-1 | | | |
| Homo_sapiens_tRNA- | GGACCTCTTGATCTGCAGTC | CABE | 791 |
| Cys-GCA-13-1 | | | |
| Homo_sapiens_tRNA- | GGGACCTCTTGATCTGCAGT | CABE | 792 |
| Cys-GCA-13-1 | | | |
| Homo_sapiens_tRNA- | GGGGACCTCTTGATCTGCAG | CABE | 793 |
| Cys-GCA-13-1 | | | |
| Homo_sapiens_tRNA- | TGGGGACCTCTTGATCTGCA | CABE | 794 |
| Cys-GCA-13-1 | | | |
| Homo_sapiens_tRNA- | GCAGTCAAATGCTCTACCCC | CABE | 795 |
| Cys-GCA-14-1 | | | |
| Homo_sapiens_tRNA- | TGCAGTCAAATGCTCTACCC | CABE | 796 |
| Cys-GCA-14-1 | | | |
| Homo_sapiens_tRNA- | CTGCAGTCAAATGCTCTACC | CABE | 797 |
| Cys-GCA-14-1 | | | |
| Homo_sapiens_tRNA- | TCTGCAGTCAAATGCTCTAC | CABE | 798 |
| Cys-GCA-14-1 | | | |
| Homo_sapiens_tRNA- | ATCTGCAGTCAAATGCTCTA | CABE | 799 |
| Cys-GCA-14-1 | | | |
| Homo_sapiens_tRNA- | GATCTGCAGTCAAATGCTCT | CABE | 800 |
| Cys-GCA-14-1 | | | |
| Homo_sapiens_tRNA- | TGATCTGCAGTCAAATGCTC | CABE | 801 |
| Cys-GCA-14-1 | | | |
| Homo_sapiens_tRNA- | TTGATCTGCAGTCAAATGCT | CABE | 802 |
| Cys-GCA-14-1 | | | |
| Homo_sapiens_tRNA- | CTTGATCTGCAGTCAAATGC | CABE | 803 |
| Cys-GCA-14-1 | | | |
| Homo_sapiens_tRNA- | TCTTGATCTGCAGTCAAATG | CABE | 804 |
| Cys-GCA-14-1 | | | |
| Homo_sapiens_tRNA- | TTCTTGATCTGCAGTCAAAT | CABE | 805 |
| Cys-GCA-14-1 | | | |
| Homo_sapiens_tRNA- | CTTCTTGATCTGCAGTCAAA | CABE | 806 |
| Cys-GCA-14-1 | | | |
| Homo_sapiens_tRNA- | ACTTCTTGATCTGCAGTCAA | CABE | 807 |
| Cys-GCA-14-1 | | | |
| Homo_sapiens_tRNA- | GACTTCTTGATCTGCAGTCA | CABE | 808 |
| Cys-GCA-14-1 | | | |
| Homo_sapiens_tRNA- | GGACTTCTTGATCTGCAGTC | CABE | 809 |
| Cys-GCA-14-1 | | | |
| Homo_sapiens_tRNA- | GGGACTTCTTGATCTGCAGT | CABE | 810 |
| Cys-GCA-14-1 | | | |
| Homo_sapiens_tRNA- | GGGGACTTCTTGATCTGCAG | CABE | 811 |
| Cys-GCA-14-1 | | | |
| Homo_sapiens_tRNA- | CGGGGACTTCTTGATCTGCA | CABE | 812 |
| Cys-GCA-14-1 | | | |
| Homo_sapiens_tRNA- | GCAGTCAAATGCTCTACCCC | CABE | 813 |
| Cys-GCA-15-1 | | | |
| Homo_sapiens_tRNA- | TGCAGTCAAATGCTCTACCC | CABE | 814 |
| Cys-GCA-15-1 | | | |
| Homo_sapiens_tRNA- | CTGCAGTCAAATGCTCTACC | CABE | 815 |
| Cys-GCA-15-1 | | | |
| Homo_sapiens_tRNA- | TCTGCAGTCAAATGCTCTAC | CABE | 816 |
| Cys-GCA-15-1 | | | |
| Homo_sapiens_tRNA- | ATCTGCAGTCAAATGCTCTA | CABE | 817 |
| Cys-GCA-15-1 | | | |
| Homo_sapiens_tRNA- | GATCTGCAGTCAAATGCTCT | CABE | 818 |
| Cys-GCA-15-1 | | | |
| Homo_sapiens_tRNA- | TGATCTGCAGTCAAATGCTC | CABE | 819 |
| Cys-GCA-15-1 | | | |
| Homo_sapiens_tRNA- | TTGATCTGCAGTCAAATGCT | CABE | 820 |
| Cys-GCA-15-1 | | | |
| Homo_sapiens_tRNA- | CTTGATCTGCAGTCAAATGC | CABE | 821 |
| Cys-GCA-15-1 | | | |
| Homo_sapiens_tRNA- | TCTTGATCTGCAGTCAAATG | CABE | 822 |
| Cys-GCA-15-1 | | | |
| Homo_sapiens_tRNA- | CTCTTGATCTGCAGTCAAAT | CABE | 823 |
| Cys-GCA-15-1 | | | |
| Homo_sapiens_tRNA- | CCTCTTGATCTGCAGTCAAA | CABE | 824 |
| Cys-GCA-15-1 | | | |
| Homo_sapiens_tRNA- | ACCTCTTGATCTGCAGTCAA | CABE | 825 |
| Cys-GCA-15-1 | | | |
| Homo_sapiens_tRNA- | GACCTCTTGATCTGCAGTCA | CABE | 826 |
| Cys-GCA-15-1 | | | |
| Homo_sapiens_tRNA- | AGACCTCTTGATCTGCAGTC | CABE | 827 |
| Cys-GCA-15-1 | | | |
| Homo_sapiens_tRNA- | GAGACCTCTTGATCTGCAGT | CABE | 828 |
| Cys-GCA-15-1 | | | |
| Homo_sapiens_tRNA- | AGAGACCTCTTGATCTGCAG | CABE | 829 |
| Cys-GCA-15-1 | | | |
| Homo_sapiens_tRNA- | CAGAGACCTCTTGATCTGCA | CABE | 830 |
| Cys-GCA-15-1 | | | |
| Homo_sapiens_tRNA- | GCAGTCAAGTGCTCTACCCC | CABE | 831 |
| Cys-GCA-16-1 | | | |
| Homo_sapiens_tRNA- | TGCAGTCAAGTGCTCTACCC | CABE | 832 |
| Cys-GCA-16-1 | | | |
| Homo_sapiens_tRNA- | CTGCAGTCAAGTGCTCTACC | CABE | 833 |
| Cys-GCA-16-1 | | | |
| Homo_sapiens_tRNA- | TCTGCAGTCAAGTGCTCTAC | CABE | 834 |
| Cys-GCA-16-1 | | | |
| Homo_sapiens_tRNA- | ATCTGCAGTCAAGTGCTCTA | CABE | 835 |
| Cys-GCA-16-1 | | | |
| Homo_sapiens_tRNA- | GATCTGCAGTCAAGTGCTCT | CABE | 836 |
| Cys-GCA-16-1 | | | |
| Homo_sapiens_tRNA- | TGATCTGCAGTCAAGTGCTC | CABE | 837 |
| Cys-GCA-16-1 | | | |
| Homo_sapiens_tRNA- | TTGATCTGCAGTCAAGTGCT | CABE | 838 |
| Cys-GCA-16-1 | | | |
| Homo_sapiens_tRNA- | CTTGATCTGCAGTCAAGTGC | CABE | 839 |
| Cys-GCA-16-1 | | | |
| Homo_sapiens_tRNA- | TCTTGATCTGCAGTCAAGTG | CABE | 840 |
| Cys-GCA-16-1 | | | |
| Homo_sapiens_tRNA- | TTCTTGATCTGCAGTCAAGT | CABE | 841 |
| Cys-GCA-16-1 | | | |
| Homo_sapiens_tRNA- | CTTCTTGATCTGCAGTCAAG | CABE | 842 |
| Cys-GCA-16-1 | | | |
| Homo_sapiens_tRNA- | ACTTCTTGATCTGCAGTCAA | CABE | 843 |
| Cys-GCA-16-1 | | | |
| Homo_sapiens_tRNA- | GACTTCTTGATCTGCAGTCA | CABE | 844 |
| Cys-GCA-16-1 | | | |
| Homo_sapiens_tRNA- | GGACTTCTTGATCTGCAGTC | CABE | 845 |
| Cys-GCA-16-1 | | | |
| Homo_sapiens_tRNA- | AGGACTTCTTGATCTGCAGT | CABE | 846 |
| Cys-GCA-16-1 | | | |
| Homo_sapiens_tRNA- | AAGGACTTCTTGATCTGCAG | CABE | 847 |
| Cys-GCA-16-1 | | | |
| Homo_sapiens_tRNA- | CAAGGACTTCTTGATCTGCA | CABE | 848 |
| Cys-GCA-16-1 | | | |
| Homo_sapiens_tRNA- | GCAGTCAAATGCTCTACCCC | CABE | 849 |
| Cys-GCA-17-1 | | | |
| Homo_sapiens_tRNA- | TGCAGTCAAATGCTCTACCC | CABE | 850 |
| Cys-GCA-17-1 | | | |
| Homo_sapiens_tRNA- | CTGCAGTCAAATGCTCTACC | CABE | 851 |
| Cys-GCA-17-1 | | | |
| Homo_sapiens_tRNA- | TCTGCAGTCAAATGCTCTAC | CABE | 852 |
| Cys-GCA-17-1 | | | |
| Homo_sapiens_tRNA- | ATCTGCAGTCAAATGCTCTA | CABE | 853 |
| Cys-GCA-17-1 | | | |
| Homo_sapiens_tRNA- | GATCTGCAGTCAAATGCTCT | CABE | 854 |
| Cys-GCA-17-1 | | | |
| Homo_sapiens_tRNA- | TGATCTGCAGTCAAATGCTC | CABE | 855 |
| Cys-GCA-17-1 | | | |
| Homo_sapiens_tRNA- | TTGATCTGCAGTCAAATGCT | CABE | 856 |
| Cys-GCA-17-1 | | | |
| Homo_sapiens_tRNA- | CTTGATCTGCAGTCAAATGC | CABE | 857 |
| Cys-GCA-17-1 | | | |
| Homo_sapiens_tRNA- | TCTTGATCTGCAGTCAAATG | CABE | 858 |
| Cys-GCA-17-1 | | | |
| Homo_sapiens_tRNA- | CTCTTGATCTGCAGTCAAAT | CABE | 859 |
| Cys-GCA-17-1 | | | |
| Homo_sapiens_tRNA- | CCTCTTGATCTGCAGTCAAA | CABE | 860 |
| Cys-GCA-17-1 | | | |
| Homo_sapiens_tRNA- | ACCTCTTGATCTGCAGTCAA | CABE | 861 |
| Cys-GCA-17-1 | | | |
| Homo_sapiens_tRNA- | GACCTCTTGATCTGCAGTCA | CABE | 862 |
| Cys-GCA-17-1 | | | |
| Homo_sapiens_tRNA- | GGACCTCTTGATCTGCAGTC | CABE | 863 |
| Cys-GCA-17-1 | | | |
| Homo_sapiens_tRNA- | GGGACCTCTTGATCTGCAGT | CABE | 864 |
| Cys-GCA-17-1 | | | |
| Homo_sapiens_tRNA- | GGGGACCTCTTGATCTGCAG | CABE | 865 |
| Cys-GCA-17-1 | | | |
| Homo_sapiens_tRNA- | CGGGGACCTCTTGATCTGCA | CABE | 866 |
| Cys-GCA-17-1 | | | |
| Homo_sapiens_tRNA- | GCAGTCAAATGCTCTACCCC | CABE | 867 |
| Cys-GCA-18-1 | | | |
| Homo_sapiens_tRNA- | TGCAGTCAAATGCTCTACCC | CABE | 868 |
| Cys-GCA-18-1 | | | |
| Homo_sapiens_tRNA- | CTGCAGTCAAATGCTCTACC | CABE | 869 |
| Cys-GCA-18-1 | | | |
| Homo_sapiens_tRNA- | TCTGCAGTCAAATGCTCTAC | CABE | 870 |
| Cys-GCA-18-1 | | | |
| Homo_sapiens_tRNA- | ATCTGCAGTCAAATGCTCTA | CABE | 871 |
| Cys-GCA-18-1 | | | |
| Homo_sapiens_tRNA- | GATCTGCAGTCAAATGCTCT | CABE | 872 |
| Cys-GCA-18-1 | | | |
| Homo_sapiens_tRNA- | TGATCTGCAGTCAAATGCTC | CABE | 873 |
| Cys-GCA-18-1 | | | |
| Homo_sapiens_tRNA- | TTGATCTGCAGTCAAATGCT | CABE | 874 |
| Cys-GCA-18-1 | | | |
| Homo_sapiens_tRNA- | CTTGATCTGCAGTCAAATGC | CABE | 875 |
| Cys-GCA-18-1 | | | |
| Homo_sapiens_tRNA- | TCTTGATCTGCAGTCAAATG | CABE | 876 |
| Cys-GCA-18-1 | | | |
| Homo_sapiens_tRNA- | CTCTTGATCTGCAGTCAAAT | CABE | 877 |
| Cys-GCA-18-1 | | | |
| Homo_sapiens_tRNA- | CCTCTTGATCTGCAGTCAAA | CABE | 878 |
| Cys-GCA-18-1 | | | |
| Homo_sapiens_tRNA- | ACCTCTTGATCTGCAGTCAA | CABE | 879 |
| Cys-GCA-18-1 | | | |
| Homo_sapiens_tRNA- | GACCTCTTGATCTGCAGTCA | CABE | 880 |
| Cys-GCA-18-1 | | | |
| Homo_sapiens_tRNA- | GGACCTCTTGATCTGCAGTC | CABE | 881 |
| Cys-GCA-18-1 | | | |
| Homo_sapiens_tRNA- | GGGACCTCTTGATCTGCAGT | CABE | 882 |
| Cys-GCA-18-1 | | | |
| Homo_sapiens_tRNA- | AGGGACCTCTTGATCTGCAG | CABE | 883 |
| Cys-GCA-18-1 | | | |
| Homo_sapiens_tRNA- | CAGGGACCTCTTGATCTGCA | CABE | 884 |
| Cys-GCA-18-1 | | | |
| Homo_sapiens_tRNA- | GCAGTCAAATGCTCTACCCC | CABE | 885 |
| Cys-GCA-19-1 | | | |
| Homo_sapiens_tRNA- | TGCAGTCAAATGCTCTACCC | CABE | 886 |
| Cys-GCA-19-1 | | | |
| Homo_sapiens_tRNA- | TTGCAGTCAAATGCTCTACC | CABE | 887 |
| Cys-GCA-19-1 | | | |
| Homo_sapiens_tRNA- | TTTGCAGTCAAATGCTCTAC | CABE | 888 |
| Cys-GCA-19-1 | | | |
| Homo_sapiens_tRNA- | ATTTGCAGTCAAATGCTCTA | CABE | 889 |
| Cys-GCA-19-1 | | | |
| Homo_sapiens_tRNA- | GATTTGCAGTCAAATGCTCT | CABE | 890 |
| Cys-GCA-19-1 | | | |
| Homo_sapiens_tRNA- | TGATTTGCAGTCAAATGCTC | CABE | 891 |
| Cys-GCA-19-1 | | | |
| Homo_sapiens_tRNA- | TTGATTTGCAGTCAAATGCT | CABE | 892 |
| Cys-GCA-19-1 | | | |
| Homo_sapiens_tRNA- | CTTGATTTGCAGTCAAATGC | CABE | 893 |
| Cys-GCA-19-1 | | | |
| Homo_sapiens_tRNA- | TCTTGATTTGCAGTCAAATG | CABE | 894 |
| Cys-GCA-19-1 | | | |
| Homo_sapiens_tRNA- | CTCTTGATTTGCAGTCAAAT | CABE | 895 |
| Cys-GCA-19-1 | | | |
| Homo_sapiens_tRNA- | CCTCTTGATTTGCAGTCAAA | CABE | 896 |
| Cys-GCA-19-1 | | | |
| Homo_sapiens_tRNA- | ACCTCTTGATTTGCAGTCAA | CABE | 897 |
| Cys-GCA-19-1 | | | |
| Homo_sapiens_tRNA- | GACCTCTTGATTTGCAGTCA | CABE | 898 |
| Cys-GCA-19-1 | | | |
| Homo_sapiens_tRNA- | GGACCTCTTGATTTGCAGTC | CABE | 899 |
| Cys-GCA-19-1 | | | |
| Homo_sapiens_tRNA- | GGGACCTCTTGATTTGCAGT | CABE | 900 |
| Cys-GCA-19-1 | | | |
| Homo_sapiens_tRNA- | AGGGACCTCTTGATTTGCAG | CABE | 901 |
| Cys-GCA-19-1 | | | |
| Homo_sapiens_tRNA- | CAGGGACCTCTTGATTTGCA | CABE | 902 |
| Cys-GCA-19-1 | | | |
| Homo_sapiens_tRNA- | GCAGTCAAATGCTCTACCAC | CABE | 903 |
| Cys-GCA-2-1 | | | |
| Homo_sapiens_tRNA- | TGCAGTCAAATGCTCTACCA | CABE | 904 |
| Cys-GCA-2-1 | | | |
| Homo_sapiens_tRNA- | CTGCAGTCAAATGCTCTACC | CABE | 905 |
| Cys-GCA-2-1 | | | |
| Homo_sapiens_tRNA- | TCTGCAGTCAAATGCTCTAC | CABE | 906 |
| Cys-GCA-2-1 | | | |
| Homo_sapiens_tRNA- | ATCTGCAGTCAAATGCTCTA | CABE | 907 |
| Cys-GCA-2-1 | | | |
| Homo_sapiens_tRNA- | GATCTGCAGTCAAATGCTCT | CABE | 908 |
| Cys-GCA-2-1 | | | |
| Homo_sapiens_tRNA- | TGATCTGCAGTCAAATGCTC | CABE | 909 |
| Cys-GCA-2-1 | | | |
| Homo_sapiens_tRNA- | TTGATCTGCAGTCAAATGCT | CABE | 910 |
| Cys-GCA-2-1 | | | |
| Homo_sapiens_tRNA- | CTTGATCTGCAGTCAAATGC | CABE | 911 |
| Cys-GCA-2-1 | | | |
| Homo_sapiens_tRNA- | TCTTGATCTGCAGTCAAATG | CABE | 912 |
| Cys-GCA-2-1 | | | |
| Homo_sapiens_tRNA- | CTCTTGATCTGCAGTCAAAT | CABE | 913 |
| Cys-GCA-2-1 | | | |
| Homo_sapiens_tRNA- | CCTCTTGATCTGCAGTCAAA | CABE | 914 |
| Cys-GCA-2-1 | | | |
| Homo_sapiens_tRNA- | ACCTCTTGATCTGCAGTCAA | CABE | 915 |
| Cys-GCA-2-1 | | | |
| Homo_sapiens_tRNA- | GACCTCTTGATCTGCAGTCA | CABE | 916 |
| Cys-GCA-2-1 | | | |
| Homo_sapiens_tRNA- | GGACCTCTTGATCTGCAGTC | CABE | 917 |
| Cys-GCA-2-1 | | | |
| Homo_sapiens_tRNA- | GGGACCTCTTGATCTGCAGT | CABE | 918 |
| Cys-GCA-2-1 | | | |
| Homo_sapiens_tRNA- | GGGGACCTCTTGATCTGCAG | CABE | 919 |
| Cys-GCA-2-1 | | | |
| Homo_sapiens_tRNA- | CGGGGACCTCTTGATCTGCA | CABE | 920 |
| Cys-GCA-2-1 | | | |
| Homo_sapiens_tRNA- | GCAGTCAAATGCTCTACCAC | CABE | 921 |
| Cys-GCA-2-2 | | | |
| Homo_sapiens_tRNA- | TGCAGTCAAATGCTCTACCA | CABE | 922 |
| Cys-GCA-2-2 | | | |
| Homo_sapiens_tRNA- | CTGCAGTCAAATGCTCTACC | CABE | 923 |
| Cys-GCA-2-2 | | | |
| Homo_sapiens_tRNA- | TCTGCAGTCAAATGCTCTAC | CABE | 924 |
| Cys-GCA-2-2 | | | |
| Homo_sapiens_tRNA- | ATCTGCAGTCAAATGCTCTA | CABE | 925 |
| Cys-GCA-2-2 | | | |
| Homo_sapiens_tRNA- | GATCTGCAGTCAAATGCTCT | CABE | 926 |
| Cys-GCA-2-2 | | | |
| Homo_sapiens_tRNA- | TGATCTGCAGTCAAATGCTC | CABE | 927 |
| Cys-GCA-2-2 | | | |
| Homo_sapiens_tRNA- | TTGATCTGCAGTCAAATGCT | CABE | 928 |
| Cys-GCA-2-2 | | | |
| Homo_sapiens_tRNA- | CTTGATCTGCAGTCAAATGC | CABE | 929 |
| Cys-GCA-2-2 | | | |
| Homo_sapiens_tRNA- | TCTTGATCTGCAGTCAAATG | CABE | 930 |
| Cys-GCA-2-2 | | | |
| Homo_sapiens_tRNA- | CTCTTGATCTGCAGTCAAAT | CABE | 931 |
| Cys-GCA-2-2 | | | |
| Homo_sapiens_tRNA- | CCTCTTGATCTGCAGTCAAA | CABE | 932 |
| Cys-GCA-2-2 | | | |
| Homo_sapiens_tRNA- | ACCTCTTGATCTGCAGTCAA | CABE | 933 |
| Cys-GCA-2-2 | | | |
| Homo_sapiens_tRNA- | GACCTCTTGATCTGCAGTCA | CABE | 934 |
| Cys-GCA-2-2 | | | |
| Homo_sapiens_tRNA- | GGACCTCTTGATCTGCAGTC | CABE | 935 |
| Cys-GCA-2-2 | | | |
| Homo_sapiens_tRNA- | GGGACCTCTTGATCTGCAGT | CABE | 936 |
| Cys-GCA-2-2 | | | |
| Homo_sapiens_tRNA- | GGGGACCTCTTGATCTGCAG | CABE | 937 |
| Cys-GCA-2-2 | | | |
| Homo_sapiens_tRNA- | CGGGGACCTCTTGATCTGCA | CABE | 938 |
| Cys-GCA-2-2 | | | |
| Homo_sapiens_tRNA- | GCAGTCAAATGCTCTACCAC | CABE | 939 |
| Cys-GCA-2-3 | | | |
| Homo_sapiens_tRNA- | TGCAGTCAAATGCTCTACCA | CABE | 940 |
| Cys-GCA-2-3 | | | |
| Homo_sapiens_tRNA- | CTGCAGTCAAATGCTCTACC | CABE | 941 |
| Cys-GCA-2-3 | | | |
| Homo_sapiens_tRNA- | TCTGCAGTCAAATGCTCTAC | CABE | 942 |
| Cys-GCA-2-3 | | | |
| Homo_sapiens_tRNA- | ATCTGCAGTCAAATGCTCTA | CABE | 943 |
| Cys-GCA-2-3 | | | |
| Homo_sapiens_tRNA- | GATCTGCAGTCAAATGCTCT | CABE | 944 |
| Cys-GCA-2-3 | | | |
| Homo_sapiens_tRNA- | TGATCTGCAGTCAAATGCTC | CABE | 945 |
| Cys-GCA-2-3 | | | |
| Homo_sapiens_tRNA- | TTGATCTGCAGTCAAATGCT | CABE | 946 |
| Cys-GCA-2-3 | | | |
| Homo_sapiens_tRNA- | CTTGATCTGCAGTCAAATGC | CABE | 947 |
| Cys-GCA-2-3 | | | |
| Homo_sapiens_tRNA- | TCTTGATCTGCAGTCAAATG | CABE | 948 |
| Cys-GCA-2-3 | | | |
| Homo_sapiens_tRNA- | CTCTTGATCTGCAGTCAAAT | CABE | 949 |
| Cys-GCA-2-3 | | | |
| Homo_sapiens_tRNA- | CCTCTTGATCTGCAGTCAAA | CABE | 950 |
| Cys-GCA-2-3 | | | |
| Homo_sapiens_tRNA- | ACCTCTTGATCTGCAGTCAA | CABE | 951 |
| Cys-GCA-2-3 | | | |
| Homo_sapiens_tRNA- | GACCTCTTGATCTGCAGTCA | CABE | 952 |
| Cys-GCA-2-3 | | | |
| Homo_sapiens_tRNA- | GGACCTCTTGATCTGCAGTC | CABE | 953 |
| Cys-GCA-2-3 | | | |
| Homo_sapiens_tRNA- | GGGACCTCTTGATCTGCAGT | CABE | 954 |
| Cys-GCA-2-3 | | | |
| Homo_sapiens_tRNA- | GGGGACCTCTTGATCTGCAG | CABE | 955 |
| Cys-GCA-2-3 | | | |
| Homo_sapiens_tRNA- | CGGGGACCTCTTGATCTGCA | CABE | 956 |
| Cys-GCA-2-3 | | | |
| Homo_sapiens_tRNA- | GCAGTCAAATGCTCTACCAC | CABE | 957 |
| Cys-GCA-2-4 | | | |
| Homo_sapiens_tRNA- | TGCAGTCAAATGCTCTACCA | CABE | 958 |
| Cys-GCA-2-4 | | | |
| Homo_sapiens_tRNA- | CTGCAGTCAAATGCTCTACC | CABE | 959 |
| Cys-GCA-2-4 | | | |
| Homo_sapiens_tRNA- | TCTGCAGTCAAATGCTCTAC | CABE | 960 |
| Cys-GCA-2-4 | | | |
| Homo_sapiens_tRNA- | ATCTGCAGTCAAATGCTCTA | CABE | 961 |
| Cys-GCA-2-4 | | | |
| Homo_sapiens_tRNA- | GATCTGCAGTCAAATGCTCT | CABE | 962 |
| Cys-GCA-2-4 | | | |
| Homo_sapiens_tRNA- | TGATCTGCAGTCAAATGCTC | CABE | 963 |
| Cys-GCA-2-4 | | | |
| Homo_sapiens_tRNA- | TTGATCTGCAGTCAAATGCT | CABE | 964 |
| Cys-GCA-2-4 | | | |
| Homo_sapiens_tRNA- | CTTGATCTGCAGTCAAATGC | CABE | 965 |
| Cys-GCA-2-4 | | | |
| Homo_sapiens_tRNA- | TCTTGATCTGCAGTCAAATG | CABE | 966 |
| Cys-GCA-2-4 | | | |
| Homo_sapiens_tRNA- | CTCTTGATCTGCAGTCAAAT | CABE | 967 |
| Cys-GCA-2-4 | | | |
| Homo_sapiens_tRNA- | CCTCTTGATCTGCAGTCAAA | CABE | 968 |
| Cys-GCA-2-4 | | | |
| Homo_sapiens_tRNA- | ACCTCTTGATCTGCAGTCAA | CABE | 969 |
| Cys-GCA-2-4 | | | |
| Homo_sapiens_tRNA- | GACCTCTTGATCTGCAGTCA | CABE | 970 |
| Cys-GCA-2-4 | | | |
| Homo_sapiens_tRNA- | GGACCTCTTGATCTGCAGTC | CABE | 971 |
| Cys-GCA-2-4 | | | |
| Homo_sapiens_tRNA- | GGGACCTCTTGATCTGCAGT | CABE | 972 |
| Cys-GCA-2-4 | | | |
| Homo_sapiens_tRNA- | GGGGACCTCTTGATCTGCAG | CABE | 973 |
| Cys-GCA-2-4 | | | |
| Homo_sapiens_tRNA- | CGGGGACCTCTTGATCTGCA | CABE | 974 |
| Cys-GCA-2-4 | | | |
| Homo_sapiens_tRNA- | GCAGTCAAATGCTCTACCCC | CABE | 975 |
| Cys-GCA-20-1 | | | |
| Homo_sapiens_tRNA- | TGCAGTCAAATGCTCTACCC | CABE | 976 |
| Cys-GCA-20-1 | | | |
| Homo_sapiens_tRNA- | CTGCAGTCAAATGCTCTACC | CABE | 977 |
| Cys-GCA-20-1 | | | |
| Homo_sapiens_tRNA- | TCTGCAGTCAAATGCTCTAC | CABE | 978 |
| Cys-GCA-20-1 | | | |
| Homo_sapiens_tRNA- | ATCTGCAGTCAAATGCTCTA | CABE | 979 |
| Cys-GCA-20-1 | | | |
| Homo_sapiens_tRNA- | GATCTGCAGTCAAATGCTCT | CABE | 980 |
| Cys-GCA-20-1 | | | |
| Homo_sapiens_tRNA- | TGATCTGCAGTCAAATGCTC | CABE | 981 |
| Cys-GCA-20-1 | | | |
| Homo_sapiens_tRNA- | TTGATCTGCAGTCAAATGCT | CABE | 982 |
| Cys-GCA-20-1 | | | |
| Homo_sapiens_tRNA- | CTTGATCTGCAGTCAAATGC | CABE | 983 |
| Cys-GCA-20-1 | | | |
| Homo_sapiens_tRNA- | TCTTGATCTGCAGTCAAATG | CABE | 984 |
| Cys-GCA-20-1 | | | |
| Homo_sapiens_tRNA- | CTCTTGATCTGCAGTCAAAT | CABE | 985 |
| Cys-GCA-20-1 | | | |
| Homo_sapiens_tRNA- | CCTCTTGATCTGCAGTCAAA | CABE | 986 |
| Cys-GCA-20-1 | | | |
| Homo_sapiens_tRNA- | ACCTCTTGATCTGCAGTCAA | CABE | 987 |
| Cys-GCA-20-1 | | | |
| Homo_sapiens_tRNA- | GACCTCTTGATCTGCAGTCA | CABE | 988 |
| Cys-GCA-20-1 | | | |
| Homo_sapiens_tRNA- | GGACCTCTTGATCTGCAGTC | CABE | 989 |
| Cys-GCA-20-1 | | | |
| Homo_sapiens_tRNA- | GGGACCTCTTGATCTGCAGT | CABE | 990 |
| Cys-GCA-20-1 | | | |
| Homo_sapiens_tRNA- | GGGGACCTCTTGATCTGCAG | CABE | 991 |
| Cys-GCA-20-1 | | | |
| Homo_sapiens_tRNA- | TGGGGACCTCTTGATCTGCA | CABE | 992 |
| Cys-GCA-20-1 | | | |
| Homo_sapiens_tRNA- | GCAGTCAAATGCTCTACCTG | CABE | 993 |
| Cys-GCA-21-1 | | | |
| Homo_sapiens_tRNA- | TGCAGTCAAATGCTCTACCT | CABE | 994 |
| Cys-GCA-21-1 | | | |
| Homo_sapiens_tRNA- | CTGCAGTCAAATGCTCTACC | CABE | 995 |
| Cys-GCA-21-1 | | | |
| Homo_sapiens_tRNA- | TCTGCAGTCAAATGCTCTAC | CABE | 996 |
| Cys-GCA-21-1 | | | |
| Homo_sapiens_tRNA- | ATCTGCAGTCAAATGCTCTA | CABE | 997 |
| Cys-GCA-21-1 | | | |
| Homo_sapiens_tRNA- | GATCTGCAGTCAAATGCTCT | CABE | 998 |
| Cys-GCA-21-1 | | | |
| Homo_sapiens_tRNA- | TGATCTGCAGTCAAATGCTC | CABE | 999 |
| Cys-GCA-21-1 | | | |
| Homo_sapiens_tRNA- | TTGATCTGCAGTCAAATGCT | CABE | 1000 |
| Cys-GCA-21-1 | | | |
| Homo_sapiens_tRNA- | CTTGATCTGCAGTCAAATGC | CABE | 1001 |
| Cys-GCA-21-1 | | | |
| Homo_sapiens_tRNA- | TCTTGATCTGCAGTCAAATG | CABE | 1002 |
| Cys-GCA-21-1 | | | |
| Homo_sapiens_tRNA- | CTCTTGATCTGCAGTCAAAT | CABE | 1003 |
| Cys-GCA-21-1 | | | |
| Homo_sapiens_tRNA- | CCTCTTGATCTGCAGTCAAA | CABE | 1004 |
| Cys-GCA-21-1 | | | |
| Homo_sapiens_tRNA- | ACCTCTTGATCTGCAGTCAA | CABE | 1005 |
| Cys-GCA-21-1 | | | |
| Homo_sapiens_tRNA- | GACCTCTTGATCTGCAGTCA | CABE | 1006 |
| Cys-GCA-21-1 | | | |
| Homo_sapiens_tRNA- | GGACCTCTTGATCTGCAGTC | CABE | 1007 |
| Cys-GCA-21-1 | | | |
| Homo_sapiens_tRNA- | GGGACCTCTTGATCTGCAGT | CABE | 1008 |
| Cys-GCA-21-1 | | | |
| Homo_sapiens_tRNA- | GGGGACCTCTTGATCTGCAG | CABE | 1009 |
| Cys-GCA-21-1 | | | |
| Homo_sapiens_tRNA- | CGGGGACCTCTTGATCTGCA | CABE | 1010 |
| Cys-GCA-21-1 | | | |
| Homo_sapiens_tRNA- | GCAGTCAAATGCTCTACCCC | CABE | 1011 |
| Cys-GCA-22-1 | | | |
| Homo_sapiens_tRNA- | TGCAGTCAAATGCTCTACCC | CABE | 1012 |
| Cys-GCA-22-1 | | | |
| Homo_sapiens_tRNA- | CTGCAGTCAAATGCTCTACC | CABE | 1013 |
| Cys-GCA-22-1 | | | |
| Homo_sapiens_tRNA- | TCTGCAGTCAAATGCTCTAC | CABE | 1014 |
| Cys-GCA-22-1 | | | |
| Homo_sapiens_tRNA- | ATCTGCAGTCAAATGCTCTA | CABE | 1015 |
| Cys-GCA-22-1 | | | |
| Homo_sapiens_tRNA- | GATCTGCAGTCAAATGCTCT | CABE | 1016 |
| Cys-GCA-22-1 | | | |
| Homo_sapiens_tRNA- | TGATCTGCAGTCAAATGCTC | CABE | 1017 |
| Cys-GCA-22-1 | | | |
| Homo_sapiens_tRNA- | TTGATCTGCAGTCAAATGCT | CABE | 1018 |
| Cys-GCA-22-1 | | | |
| Homo_sapiens_tRNA- | CTTGATCTGCAGTCAAATGC | CABE | 1019 |
| Cys-GCA-22-1 | | | |
| Homo_sapiens_tRNA- | TCTTGATCTGCAGTCAAATG | CABE | 1020 |
| Cys-GCA-22-1 | | | |
| Homo_sapiens_tRNA- | CTCTTGATCTGCAGTCAAAT | CABE | 1021 |
| Cys-GCA-22-1 | | | |
| Homo_sapiens_tRNA- | CCTCTTGATCTGCAGTCAAA | CABE | 1022 |
| Cys-GCA-22-1 | | | |
| Homo_sapiens_tRNA- | ACCTCTTGATCTGCAGTCAA | CABE | 1023 |
| Cys-GCA-22-1 | | | |
| Homo_sapiens_tRNA- | GACCTCTTGATCTGCAGTCA | CABE | 1024 |
| Cys-GCA-22-1 | | | |
| Homo_sapiens_tRNA- | GGACCTCTTGATCTGCAGTC | CABE | 1025 |
| Cys-GCA-22-1 | | | |
| Homo_sapiens_tRNA- | GGGACCTCTTGATCTGCAGT | CABE | 1026 |
| Cys-GCA-22-1 | | | |
| Homo_sapiens_tRNA- | GGGGACCTCTTGATCTGCAG | CABE | 1027 |
| Cys-GCA-22-1 | | | |
| Homo_sapiens_tRNA- | TGGGGACCTCTTGATCTGCA | CABE | 1028 |
| Cys-GCA-22-1 | | | |
| Homo_sapiens_tRNA- | GCAGTCAAATGCTCTACCTG | CABE | 1029 |
| Cys-GCA-23-1 | | | |
| Homo_sapiens_tRNA- | TGCAGTCAAATGCTCTACCT | CABE | 1030 |
| Cys-GCA-23-1 | | | |
| Homo_sapiens_tRNA- | CTGCAGTCAAATGCTCTACC | CABE | 1031 |
| Cys-GCA-23-1 | | | |
| Homo_sapiens_tRNA- | TCTGCAGTCAAATGCTCTAC | CABE | 1032 |
| Cys-GCA-23-1 | | | |
| Homo_sapiens_tRNA- | ATCTGCAGTCAAATGCTCTA | CABE | 1033 |
| Cys-GCA-23-1 | | | |
| Homo_sapiens_tRNA- | GATCTGCAGTCAAATGCTCT | CABE | 1034 |
| Cys-GCA-23-1 | | | |
| Homo_sapiens_tRNA- | TGATCTGCAGTCAAATGCTC | CABE | 1035 |
| Cys-GCA-23-1 | | | |
| Homo_sapiens_tRNA- | TTGATCTGCAGTCAAATGCT | CABE | 1036 |
| Cys-GCA-23-1 | | | |
| Homo_sapiens_tRNA- | CTTGATCTGCAGTCAAATGC | CABE | 1037 |
| Cys-GCA-23-1 | | | |
| Homo_sapiens_tRNA- | TCTTGATCTGCAGTCAAATG | CABE | 1038 |
| Cys-GCA-23-1 | | | |
| Homo_sapiens_tRNA- | CTCTTGATCTGCAGTCAAAT | CABE | 1039 |
| Cys-GCA-23-1 | | | |
| Homo_sapiens_tRNA- | CCTCTTGATCTGCAGTCAAA | CABE | 1040 |
| Cys-GCA-23-1 | | | |
| Homo_sapiens_tRNA- | ACCTCTTGATCTGCAGTCAA | CABE | 1041 |
| Cys-GCA-23-1 | | | |
| Homo_sapiens_tRNA- | GACCTCTTGATCTGCAGTCA | CABE | 1042 |
| Cys-GCA-23-1 | | | |
| Homo_sapiens_tRNA- | GGACCTCTTGATCTGCAGTC | CABE | 1043 |
| Cys-GCA-23-1 | | | |
| Homo_sapiens_tRNA- | GGGACCTCTTGATCTGCAGT | CABE | 1044 |
| Cys-GCA-23-1 | | | |
| Homo_sapiens_tRNA- | GGGGACCTCTTGATCTGCAG | CABE | 1045 |
| Cys-GCA-23-1 | | | |
| Homo_sapiens_tRNA- | CGGGGACCTCTTGATCTGCA | CABE | 1046 |
| Cys-GCA-23-1 | | | |
| Homo_sapiens_tRNA- | GCAGTCAAGTGCTCTACCCC | CABE | 1047 |
| Cys-GCA-3-1 | | | |
| Homo_sapiens_tRNA- | TGCAGTCAAGTGCTCTACCC | CABE | 1048 |
| Cys-GCA-3-1 | | | |
| Homo_sapiens_tRNA- | CTGCAGTCAAGTGCTCTACC | CABE | 1049 |
| Cys-GCA-3-1 | | | |
| Homo_sapiens_tRNA- | TCTGCAGTCAAGTGCTCTAC | CABE | 1050 |
| Cys-GCA-3-1 | | | |
| Homo_sapiens_tRNA- | ATCTGCAGTCAAGTGCTCTA | CABE | 1051 |
| Cys-GCA-3-1 | | | |
| Homo_sapiens_tRNA- | GATCTGCAGTCAAGTGCTCT | CABE | 1052 |
| Cys-GCA-3-1 | | | |
| Homo_sapiens_tRNA- | TGATCTGCAGTCAAGTGCTC | CABE | 1053 |
| Cys-GCA-3-1 | | | |
| Homo_sapiens_tRNA- | TTGATCTGCAGTCAAGTGCT | CABE | 1054 |
| Cys-GCA-3-1 | | | |
| Homo_sapiens_tRNA- | CTTGATCTGCAGTCAAGTGC | CABE | 1055 |
| Cys-GCA-3-1 | | | |
| Homo_sapiens_tRNA- | TCTTGATCTGCAGTCAAGTG | CABE | 1056 |
| Cys-GCA-3-1 | | | |
| Homo_sapiens_tRNA- | CTCTTGATCTGCAGTCAAGT | CABE | 1057 |
| Cys-GCA-3-1 | | | |
| Homo_sapiens_tRNA- | CCTCTTGATCTGCAGTCAAG | CABE | 1058 |
| Cys-GCA-3-1 | | | |
| Homo_sapiens_tRNA- | ACCTCTTGATCTGCAGTCAA | CABE | 1059 |
| Cys-GCA-3-1 | | | |
| Homo_sapiens_tRNA- | GACCTCTTGATCTGCAGTCA | CABE | 1060 |
| Cys-GCA-3-1 | | | |
| Homo_sapiens_tRNA- | GGACCTCTTGATCTGCAGTC | CABE | 1061 |
| Cys-GCA-3-1 | | | |
| Homo_sapiens_tRNA- | GGGACCTCTTGATCTGCAGT | CABE | 1062 |
| Cys-GCA-3-1 | | | |
| Homo_sapiens_tRNA- | AGGGACCTCTTGATCTGCAG | CABE | 1063 |
| Cys-GCA-3-1 | | | |
| Homo_sapiens_tRNA- | CAGGGACCTCTTGATCTGCA | CABE | 1064 |
| Cys-GCA-3-1 | | | |
| Homo_sapiens_tRNA- | GCAGTCAAATGCTCTACCAC | CABE | 1065 |
| Cys-GCA-4-1 | | | |
| Homo_sapiens_tRNA- | TGCAGTCAAATGCTCTACCA | CABE | 1066 |
| Cys-GCA-4-1 | | | |
| Homo_sapiens_tRNA- | CTGCAGTCAAATGCTCTACC | CABE | 1067 |
| Cys-GCA-4-1 | | | |
| Homo_sapiens_tRNA- | TCTGCAGTCAAATGCTCTAC | CABE | 1068 |
| Cys-GCA-4-1 | | | |
| Homo_sapiens_tRNA- | ATCTGCAGTCAAATGCTCTA | CABE | 1069 |
| Cys-GCA-4-1 | | | |
| Homo_sapiens_tRNA- | GATCTGCAGTCAAATGCTCT | CABE | 1070 |
| Cys-GCA-4-1 | | | |
| Homo_sapiens_tRNA- | TGATCTGCAGTCAAATGCTC | CABE | 1071 |
| Cys-GCA-4-1 | | | |
| Homo_sapiens_tRNA- | TTGATCTGCAGTCAAATGCT | CABE | 1072 |
| Cys-GCA-4-1 | | | |
| Homo_sapiens_tRNA- | CTTGATCTGCAGTCAAATGC | CABE | 1073 |
| Cys-GCA-4-1 | | | |
| Homo_sapiens_tRNA- | TCTTGATCTGCAGTCAAATG | CABE | 1074 |
| Cys-GCA-4-1 | | | |
| Homo_sapiens_tRNA- | CTCTTGATCTGCAGTCAAAT | CABE | 1075 |
| Cys-GCA-4-1 | | | |
| Homo_sapiens_tRNA- | CCTCTTGATCTGCAGTCAAA | CABE | 1076 |
| Cys-GCA-4-1 | | | |
| Homo_sapiens_tRNA- | ACCTCTTGATCTGCAGTCAA | CABE | 1077 |
| Cys-GCA-4-1 | | | |
| Homo_sapiens_tRNA- | GACCTCTTGATCTGCAGTCA | CABE | 1078 |
| Cys-GCA-4-1 | | | |
| Homo_sapiens_tRNA- | GGACCTCTTGATCTGCAGTC | CABE | 1079 |
| Cys-GCA-4-1 | | | |
| Homo_sapiens_tRNA- | GGGACCTCTTGATCTGCAGT | CABE | 1080 |
| Cys-GCA-4-1 | | | |
| Homo_sapiens_tRNA- | AGGGACCTCTTGATCTGCAG | CABE | 1081 |
| Cys-GCA-4-1 | | | |
| Homo_sapiens_tRNA- | CAGGGACCTCTTGATCTGCA | CABE | 1082 |
| Cys-GCA-4-1 | | | |
| Homo_sapiens_tRNA- | CAGTCAAATGCTCTACCCAC | CABE | 1083 |
| Cys-GCA-5-1 | | | |
| Homo_sapiens_tRNA- | GCAGTCAAATGCTCTACCCA | CABE | 1084 |
| Cys-GCA-5-1 | | | |
| Homo_sapiens_tRNA- | TGCAGTCAAATGCTCTACCC | CABE | 1085 |
| Cys-GCA-5-1 | | | |
| Homo_sapiens_tRNA- | CTGCAGTCAAATGCTCTACC | CABE | 1086 |
| Cys-GCA-5-1 | | | |
| Homo_sapiens_tRNA- | TCTGCAGTCAAATGCTCTAC | CABE | 1087 |
| Cys-GCA-5-1 | | | |
| Homo_sapiens_tRNA- | ATCTGCAGTCAAATGCTCTA | CABE | 1088 |
| Cys-GCA-5-1 | | | |
| Homo_sapiens_tRNA- | GATCTGCAGTCAAATGCTCT | CABE | 1089 |
| Cys-GCA-5-1 | | | |
| Homo_sapiens_tRNA- | TGATCTGCAGTCAAATGCTC | CABE | 1090 |
| Cys-GCA-5-1 | | | |
| Homo_sapiens_tRNA- | TTGATCTGCAGTCAAATGCT | CABE | 1091 |
| Cys-GCA-5-1 | | | |
| Homo_sapiens_tRNA- | CTTGATCTGCAGTCAAATGC | CABE | 1092 |
| Cys-GCA-5-1 | | | |
| Homo_sapiens_tRNA- | TCTTGATCTGCAGTCAAATG | CABE | 1093 |
| Cys-GCA-5-1 | | | |
| Homo_sapiens_tRNA- | CTCTTGATCTGCAGTCAAAT | CABE | 1094 |
| Cys-GCA-5-1 | | | |
| Homo_sapiens_tRNA- | CCTCTTGATCTGCAGTCAAA | CABE | 1095 |
| Cys-GCA-5-1 | | | |
| Homo_sapiens_tRNA- | ACCTCTTGATCTGCAGTCAA | CABE | 1096 |
| Cys-GCA-5-1 | | | |
| Homo_sapiens_tRNA- | GACCTCTTGATCTGCAGTCA | CABE | 1097 |
| Cys-GCA-5-1 | | | |
| Homo_sapiens_tRNA- | GGACCTCTTGATCTGCAGTC | CABE | 1098 |
| Cys-GCA-5-1 | | | |
| Homo_sapiens_tRNA- | GGGACCTCTTGATCTGCAGT | CABE | 1099 |
| Cys-GCA-5-1 | | | |
| Homo_sapiens_tRNA- | GGGGACCTCTTGATCTGCAG | CABE | 1100 |
| Cys-GCA-5-1 | | | |
| Homo_sapiens_tRNA- | GCAGTCAAATGCTCTACCAC | CABE | 1101 |
| Cys-GCA-6-1 | | | |
| Homo_sapiens_tRNA- | TGCAGTCAAATGCTCTACCA | CABE | 1102 |
| Cys-GCA-6-1 | | | |
| Homo_sapiens_tRNA- | CTGCAGTCAAATGCTCTACC | CABE | 1103 |
| Cys-GCA-6-1 | | | |
| Homo_sapiens_tRNA- | TCTGCAGTCAAATGCTCTAC | CABE | 1104 |
| Cys-GCA-6-1 | | | |
| Homo_sapiens_tRNA- | ATCTGCAGTCAAATGCTCTA | CABE | 1105 |
| Cys-GCA-6-1 | | | |
| Homo_sapiens_tRNA- | GATCTGCAGTCAAATGCTCT | CABE | 1106 |
| Cys-GCA-6-1 | | | |
| Homo_sapiens_tRNA- | TGATCTGCAGTCAAATGCTC | CABE | 1107 |
| Cys-GCA-6-1 | | | |
| Homo_sapiens_tRNA- | TTGATCTGCAGTCAAATGCT | CABE | 1108 |
| Cys-GCA-6-1 | | | |
| Homo_sapiens_tRNA- | CTTGATCTGCAGTCAAATGC | CABE | 1109 |
| Cys-GCA-6-1 | | | |
| Homo_sapiens_tRNA- | TCTTGATCTGCAGTCAAATG | CABE | 1110 |
| Cys-GCA-6-1 | | | |
| Homo_sapiens_tRNA- | CTCTTGATCTGCAGTCAAAT | CABE | 1111 |
| Cys-GCA-6-1 | | | |
| Homo_sapiens_tRNA- | CCTCTTGATCTGCAGTCAAA | CABE | 1112 |
| Cys-GCA-6-1 | | | |
| Homo_sapiens_tRNA- | ACCTCTTGATCTGCAGTCAA | CABE | 1113 |
| Cys-GCA-6-1 | | | |
| Homo_sapiens_tRNA- | GACCTCTTGATCTGCAGTCA | CABE | 1114 |
| Cys-GCA-6-1 | | | |
| Homo_sapiens_tRNA- | GGACCTCTTGATCTGCAGTC | CABE | 1115 |
| Cys-GCA-6-1 | | | |
| Homo_sapiens_tRNA- | GGGACCTCTTGATCTGCAGT | CABE | 1116 |
| Cys-GCA-6-1 | | | |
| Homo_sapiens_tRNA- | AGGGACCTCTTGATCTGCAG | CABE | 1117 |
| Cys-GCA-6-1 | | | |
| Homo_sapiens_tRNA- | CAGGGACCTCTTGATCTGCA | CABE | 1118 |
| Cys-GCA-6-1 | | | |
| Homo_sapiens_tRNA- | CAGTCAAATGCTCTACCACC | CABE | 1119 |
| Cys-GCA-7-1 | | | |
| Homo_sapiens_tRNA- | GCAGTCAAATGCTCTACCAC | CABE | 1120 |
| Cys-GCA-7-1 | | | |
| Homo_sapiens_tRNA- | TGCAGTCAAATGCTCTACCA | CABE | 1121 |
| Cys-GCA-7-1 | | | |
| Homo_sapiens_tRNA- | CTGCAGTCAAATGCTCTACC | CABE | 1122 |
| Cys-GCA-7-1 | | | |
| Homo_sapiens_tRNA- | TCTGCAGTCAAATGCTCTAC | CABE | 1123 |
| Cys-GCA-7-1 | | | |
| Homo_sapiens_tRNA- | ATCTGCAGTCAAATGCTCTA | CABE | 1124 |
| Cys-GCA-7-1 | | | |
| Homo_sapiens_tRNA- | GATCTGCAGTCAAATGCTCT | CABE | 1125 |
| Cys-GCA-7-1 | | | |
| Homo_sapiens_tRNA- | TGATCTGCAGTCAAATGCTC | CABE | 1126 |
| Cys-GCA-7-1 | | | |
| Homo_sapiens_tRNA- | TTGATCTGCAGTCAAATGCT | CABE | 1127 |
| Cys-GCA-7-1 | | | |
| Homo_sapiens_tRNA- | CTTGATCTGCAGTCAAATGC | CABE | 1128 |
| Cys-GCA-7-1 | | | |
| Homo_sapiens_tRNA- | TCTTGATCTGCAGTCAAATG | CABE | 1129 |
| Cys-GCA-7-1 | | | |
| Homo_sapiens_tRNA- | CTCTTGATCTGCAGTCAAAT | CABE | 1130 |
| Cys-GCA-7-1 | | | |
| Homo_sapiens_tRNA- | CCTCTTGATCTGCAGTCAAA | CABE | 1131 |
| Cys-GCA-7-1 | | | |
| Homo_sapiens_tRNA- | ACCTCTTGATCTGCAGTCAA | CABE | 1132 |
| Cys-GCA-7-1 | | | |
| Homo_sapiens_tRNA- | GACCTCTTGATCTGCAGTCA | CABE | 1133 |
| Cys-GCA-7-1 | | | |
| Homo_sapiens_tRNA- | GGACCTCTTGATCTGCAGTC | CABE | 1134 |
| Cys-GCA-7-1 | | | |
| Homo_sapiens_tRNA- | GGGACCTCTTGATCTGCAGT | CABE | 1135 |
| Cys-GCA-7-1 | | | |
| Homo_sapiens_tRNA- | GGGGACCTCTTGATCTGCAG | CABE | 1136 |
| Cys-GCA-7-1 | | | |
| Homo_sapiens_tRNA- | GCAGTCAAATGCTCTACCCC | CABE | 1137 |
| Cys-GCA-8-1 | | | |
| Homo_sapiens_tRNA- | TGCAGTCAAATGCTCTACCC | CABE | 1138 |
| Cys-GCA-8-1 | | | |
| Homo_sapiens_tRNA- | CTGCAGTCAAATGCTCTACC | CABE | 1139 |
| Cys-GCA-8-1 | | | |
| Homo_sapiens_tRNA- | TCTGCAGTCAAATGCTCTAC | CABE | 1140 |
| Cys-GCA-8-1 | | | |
| Homo_sapiens_tRNA- | ATCTGCAGTCAAATGCTCTA | CABE | 1141 |
| Cys-GCA-8-1 | | | |
| Homo_sapiens_tRNA- | GATCTGCAGTCAAATGCTCT | CABE | 1142 |
| Cys-GCA-8-1 | | | |
| Homo_sapiens_tRNA- | TGATCTGCAGTCAAATGCTC | CABE | 1143 |
| Cys-GCA-8-1 | | | |
| Homo_sapiens_tRNA- | TTGATCTGCAGTCAAATGCT | CABE | 1144 |
| Cys-GCA-8-1 | | | |
| Homo_sapiens_tRNA- | CTTGATCTGCAGTCAAATGC | CABE | 1145 |
| Cys-GCA-8-1 | | | |
| Homo_sapiens_tRNA- | TCTTGATCTGCAGTCAAATG | CABE | 1146 |
| Cys-GCA-8-1 | | | |
| Homo_sapiens_tRNA- | CTCTTGATCTGCAGTCAAAT | CABE | 1147 |
| Cys-GCA-8-1 | | | |
| Homo_sapiens_tRNA- | CCTCTTGATCTGCAGTCAAA | CABE | 1148 |
| Cys-GCA-8-1 | | | |
| Homo_sapiens_tRNA- | ACCTCTTGATCTGCAGTCAA | CABE | 1149 |
| Cys-GCA-8-1 | | | |
| Homo_sapiens_tRNA- | GACCTCTTGATCTGCAGTCA | CABE | 1150 |
| Cys-GCA-8-1 | | | |
| Homo_sapiens_tRNA- | GGACCTCTTGATCTGCAGTC | CABE | 1151 |
| Cys-GCA-8-1 | | | |
| Homo_sapiens_tRNA- | GGGACCTCTTGATCTGCAGT | CABE | 1152 |
| Cys-GCA-8-1 | | | |
| Homo_sapiens_tRNA- | GGGGACCTCTTGATCTGCAG | CABE | 1153 |
| Cys-GCA-8-1 | | | |
| Homo_sapiens_tRNA- | CGGGGACCTCTTGATCTGCA | CABE | 1154 |
| Cys-GCA-8-1 | | | |
| Homo_sapiens_tRNA- | GCAGTCAAATGCTCTACCCC | CABE | 1155 |
| Cys-GCA-9-1 | | | |
| Homo_sapiens_tRNA- | TGCAGTCAAATGCTCTACCC | CABE | 1156 |
| Cys-GCA-9-1 | | | |
| Homo_sapiens_tRNA- | CTGCAGTCAAATGCTCTACC | CABE | 1157 |
| Cys-GCA-9-1 | | | |
| Homo_sapiens_tRNA- | TCTGCAGTCAAATGCTCTAC | CABE | 1158 |
| Cys-GCA-9-1 | | | |
| Homo_sapiens_tRNA- | ATCTGCAGTCAAATGCTCTA | CABE | 1159 |
| Cys-GCA-9-1 | | | |
| Homo_sapiens_tRNA- | GATCTGCAGTCAAATGCTCT | CABE | 1160 |
| Cys-GCA-9-1 | | | |
| Homo_sapiens_tRNA- | TGATCTGCAGTCAAATGCTC | CABE | 1161 |
| Cys-GCA-9-1 | | | |
| Homo_sapiens_tRNA- | TTGATCTGCAGTCAAATGCT | CABE | 1162 |
| Cys-GCA-9-1 | | | |
| Homo_sapiens_tRNA- | CTTGATCTGCAGTCAAATGC | CABE | 1163 |
| Cys-GCA-9-1 | | | |
| Homo_sapiens_tRNA- | TCTTGATCTGCAGTCAAATG | CABE | 1164 |
| Cys-GCA-9-1 | | | |
| Homo_sapiens_tRNA- | CTCTTGATCTGCAGTCAAAT | CABE | 1165 |
| Cys-GCA-9-1 | | | |
| Homo_sapiens_tRNA- | CCTCTTGATCTGCAGTCAAA | CABE | 1166 |
| Cys-GCA-9-1 | | | |
| Homo_sapiens_tRNA- | ACCTCTTGATCTGCAGTCAA | CABE | 1167 |
| Cys-GCA-9-1 | | | |
| Homo_sapiens_tRNA- | GACCTCTTGATCTGCAGTCA | CABE | 1168 |
| Cys-GCA-9-1 | | | |
| Homo_sapiens_tRNA- | GGACCTCTTGATCTGCAGTC | CABE | 1169 |
| Cys-GCA-9-1 | | | |
| Homo_sapiens_tRNA- | GGGACCTCTTGATCTGCAGT | CABE | 1170 |
| Cys-GCA-9-1 | | | |
| Homo_sapiens_tRNA- | AGGGACCTCTTGATCTGCAG | CABE | 1171 |
| Cys-GCA-9-1 | | | |
| Homo_sapiens_tRNA- | CAGGGACCTCTTGATCTGCA | CABE | 1172 |
| Cys-GCA-9-1 | | | |
| Homo_sapiens_tRNA- | GCAGTCAAATGCTCTACCCC | CABE | 1173 |
| Cys-GCA-9-2 | | | |
| Homo_sapiens_tRNA- | TGCAGTCAAATGCTCTACCC | CABE | 1174 |
| Cys-GCA-9-2 | | | |
| Homo_sapiens_tRNA- | CTGCAGTCAAATGCTCTACC | CABE | 1175 |
| Cys-GCA-9-2 | | | |
| Homo_sapiens_tRNA- | TCTGCAGTCAAATGCTCTAC | CABE | 1176 |
| Cys-GCA-9-2 | | | |
| Homo_sapiens_tRNA- | ATCTGCAGTCAAATGCTCTA | CABE | 1177 |
| Cys-GCA-9-2 | | | |
| Homo_sapiens_tRNA- | GATCTGCAGTCAAATGCTCT | CABE | 1178 |
| Cys-GCA-9-2 | | | |
| Homo_sapiens_tRNA- | TGATCTGCAGTCAAATGCTC | CABE | 1179 |
| Cys-GCA-9-2 | | | |
| Homo_sapiens_tRNA- | TTGATCTGCAGTCAAATGCT | CABE | 1180 |
| Cys-GCA-9-2 | | | |
| Homo_sapiens_tRNA- | CTTGATCTGCAGTCAAATGC | CABE | 1181 |
| Cys-GCA-9-2 | | | |
| Homo_sapiens_tRNA- | TCTTGATCTGCAGTCAAATG | CABE | 1182 |
| Cys-GCA-9-2 | | | |
| Homo_sapiens_tRNA- | CTCTTGATCTGCAGTCAAAT | CABE | 1183 |
| Cys-GCA-9-2 | | | |
| Homo_sapiens_tRNA- | CCTCTTGATCTGCAGTCAAA | CABE | 1184 |
| Cys-GCA-9-2 | | | |
| Homo_sapiens_tRNA- | ACCTCTTGATCTGCAGTCAA | CABE | 1185 |
| Cys-GCA-9-2 | | | |
| Homo_sapiens_tRNA- | GACCTCTTGATCTGCAGTCA | CABE | 1186 |
| Cys-GCA-9-2 | | | |
| Homo_sapiens_tRNA- | GGACCTCTTGATCTGCAGTC | CABE | 1187 |
| Cys-GCA-9-2 | | | |
| Homo_sapiens_tRNA- | GGGACCTCTTGATCTGCAGT | CABE | 1188 |
| Cys-GCA-9-2 | | | |
| Homo_sapiens_tRNA- | AGGGACCTCTTGATCTGCAG | CABE | 1189 |
| Cys-GCA-9-2 | | | |
| Homo_sapiens_tRNA- | CAGGGACCTCTTGATCTGCA | CABE | 1190 |
| Cys-GCA-9-2 | | | |
| Homo_sapiens_tRNA- | GCAGTCAAATGCTCTACCCC | CABE | 1191 |
| Cys-GCA-9-3 | | | |
| Homo_sapiens_tRNA- | TGCAGTCAAATGCTCTACCC | CABE | 1192 |
| Cys-GCA-9-3 | | | |
| Homo_sapiens_tRNA- | CTGCAGTCAAATGCTCTACC | CABE | 1193 |
| Cys-GCA-9-3 | | | |
| Homo_sapiens_tRNA- | TCTGCAGTCAAATGCTCTAC | CABE | 1194 |
| Cys-GCA-9-3 | | | |
| Homo_sapiens_tRNA- | ATCTGCAGTCAAATGCTCTA | CABE | 1195 |
| Cys-GCA-9-3 | | | |
| Homo_sapiens_tRNA- | GATCTGCAGTCAAATGCTCT | CABE | 1196 |
| Cys-GCA-9-3 | | | |
| Homo_sapiens_tRNA- | TGATCTGCAGTCAAATGCTC | CABE | 1197 |
| Cys-GCA-9-3 | | | |
| Homo_sapiens_tRNA- | TTGATCTGCAGTCAAATGCT | CABE | 1198 |
| Cys-GCA-9-3 | | | |
| Homo_sapiens_tRNA- | CTTGATCTGCAGTCAAATGC | CABE | 1199 |
| Cys-GCA-9-3 | | | |
| Homo_sapiens_tRNA- | TCTTGATCTGCAGTCAAATG | CABE | 1200 |
| Cys-GCA-9-3 | | | |
| Homo_sapiens_tRNA- | CTCTTGATCTGCAGTCAAAT | CABE | 1201 |
| Cys-GCA-9-3 | | | |
| Homo_sapiens_tRNA- | CCTCTTGATCTGCAGTCAAA | CABE | 1202 |
| Cys-GCA-9-3 | | | |
| Homo_sapiens_tRNA- | ACCTCTTGATCTGCAGTCAA | CABE | 1203 |
| Cys-GCA-9-3 | | | |
| Homo_sapiens_tRNA- | GACCTCTTGATCTGCAGTCA | CABE | 1204 |
| Cys-GCA-9-3 | | | |
| Homo_sapiens_tRNA- | GGACCTCTTGATCTGCAGTC | CABE | 1205 |
| Cys-GCA-9-3 | | | |
| Homo_sapiens_tRNA- | GGGACCTCTTGATCTGCAGT | CABE | 1206 |
| Cys-GCA-9-3 | | | |
| Homo_sapiens_tRNA- | AGGGACCTCTTGATCTGCAG | CABE | 1207 |
| Cys-GCA-9-3 | | | |
| Homo_sapiens_tRNA- | CAGGGACCTCTTGATCTGCA | CABE | 1208 |
| Cys-GCA-9-3 | | | |
| Homo_sapiens_tRNA- | GCAGTCAAATGCTCTACCCC | CABE | 1209 |
| Cys-GCA-9-4 | | | |
| Homo_sapiens_tRNA- | TGCAGTCAAATGCTCTACCC | CABE | 1210 |
| Cys-GCA-9-4 | | | |
| Homo_sapiens_tRNA- | CTGCAGTCAAATGCTCTACC | CABE | 1211 |
| Cys-GCA-9-4 | | | |
| Homo_sapiens_tRNA- | TCTGCAGTCAAATGCTCTAC | CABE | 1212 |
| Cys-GCA-9-4 | | | |
| Homo_sapiens_tRNA- | ATCTGCAGTCAAATGCTCTA | CABE | 1213 |
| Cys-GCA-9-4 | | | |
| Homo_sapiens_tRNA- | GATCTGCAGTCAAATGCTCT | CABE | 1214 |
| Cys-GCA-9-4 | | | |
| Homo_sapiens_tRNA- | TGATCTGCAGTCAAATGCTC | CABE | 1215 |
| Cys-GCA-9-4 | | | |
| Homo_sapiens_tRNA- | TTGATCTGCAGTCAAATGCT | CABE | 1216 |
| Cys-GCA-9-4 | | | |
| Homo_sapiens_tRNA- | CTTGATCTGCAGTCAAATGC | CABE | 1217 |
| Cys-GCA-9-4 | | | |
| Homo_sapiens_tRNA- | TCTTGATCTGCAGTCAAATG | CABE | 1218 |
| Cys-GCA-9-4 | | | |
| Homo_sapiens_tRNA- | CTCTTGATCTGCAGTCAAAT | CABE | 1219 |
| Cys-GCA-9-4 | | | |
| Homo_sapiens_tRNA- | CCTCTTGATCTGCAGTCAAA | CABE | 1220 |
| Cys-GCA-9-4 | | | |
| Homo_sapiens_tRNA- | ACCTCTTGATCTGCAGTCAA | CABE | 1221 |
| Cys-GCA-9-4 | | | |
| Homo_sapiens_tRNA- | GACCTCTTGATCTGCAGTCA | CABE | 1222 |
| Cys-GCA-9-4 | | | |
| Homo_sapiens_tRNA- | GGACCTCTTGATCTGCAGTC | CABE | 1223 |
| Cys-GCA-9-4 | | | |
| Homo_sapiens_tRNA- | GGGACCTCTTGATCTGCAGT | CABE | 1224 |
| Cys-GCA-9-4 | | | |
| Homo_sapiens_tRNA- | AGGGACCTCTTGATCTGCAG | CABE | 1225 |
| Cys-GCA-9-4 | | | |
| Homo_sapiens_tRNA- | CAGGGACCTCTTGATCTGCA | CABE | 1226 |
| Cys-GCA-9-4 | | | |
| Homo_sapiens_tRNA- | GAGTCCAGAGTGCTAACCAT | CBE | 1227 |
| Gln-CTG-1-1 | | | |
| Homo_sapiens_tRNA- | AGAGTCCAGAGTGCTAACCA | CBE | 1228 |
| Gln-CTG-1-1 | | | |
| Homo_sapiens_tRNA- | CAGAGTCCAGAGTGCTAACC | CBE | 1229 |
| Gln-CTG-1-1 | | | |
| Homo_sapiens_tRNA- | TCAGAGTCCAGAGTGCTAAC | CBE | 1230 |
| Gln-CTG-1-1 | | | |
| Homo_sapiens_tRNA- | TTCAGAGTCCAGAGTGCTAA | CBE | 1231 |
| Gln-CTG-1-1 | | | |
| Homo_sapiens_tRNA- | ATTCAGAGTCCAGAGTGCTA | CBE | 1232 |
| Gln-CTG-1-1 | | | |
| Homo_sapiens_tRNA- | GATTCAGAGTCCAGAGTGCT | CBE | 1233 |
| Gln-CTG-1-1 | | | |
| Homo_sapiens_tRNA- | GGATTCAGAGTCCAGAGTGC | CBE | 1234 |
| Gln-CTG-1-1 | | | |
| Homo_sapiens_tRNA- | TGGATTCAGAGTCCAGAGTG | CBE | 1235 |
| Gln-CTG-1-1 | | | |
| Homo_sapiens_tRNA- | CTGGATTCAGAGTCCAGAGT | CBE | 1236 |
| Gln-CTG-1-1 | | | |
| Homo_sapiens_tRNA- | GCTGGATTCAGAGTCCAGAG | CBE | 1237 |
| Gln-CTG-1-1 | | | |
| Homo_sapiens_tRNA- | CGCTGGATTCAGAGTCCAGA | CBE | 1238 |
| Gln-CTG-1-1 | | | |
| Homo_sapiens_tRNA- | TCGCTGGATTCAGAGTCCAG | CBE | 1239 |
| Gln-CTG-1-1 | | | |
| Homo_sapiens_tRNA- | ATCGCTGGATTCAGAGTCCA | CBE | 1240 |
| Gln-CTG-1-1 | | | |
| Homo_sapiens_tRNA- | GATCGCTGGATTCAGAGTCC | CBE | 1241 |
| Gln-CTG-1-1 | | | |
| Homo_sapiens_tRNA- | GGATCGCTGGATTCAGAGTC | CBE | 1242 |
| Gln-CTG-1-1 | | | |
| Homo_sapiens_tRNA- | CGGATCGCTGGATTCAGAGT | CBE | 1243 |
| Gln-CTG-1-1 | | | |
| Homo_sapiens_tRNA- | TCGGATCGCTGGATTCAGAG | CBE | 1244 |
| Gln-CTG-1-1 | | | |
| Homo_sapiens_tRNA- | GAGTCCAGAGTGCTAACCAT | CBE | 1245 |
| Gln-CTG-1-2 | | | |
| Homo_sapiens_tRNA- | AGAGTCCAGAGTGCTAACCA | CBE | 1246 |
| Gln-CTG-1-2 | | | |
| Homo_sapiens_tRNA- | CAGAGTCCAGAGTGCTAACC | CBE | 1247 |
| Gln-CTG-1-2 | | | |
| Homo_sapiens_tRNA- | TCAGAGTCCAGAGTGCTAAC | CBE | 1248 |
| Gln-CTG-1-2 | | | |
| Homo_sapiens_tRNA- | TTCAGAGTCCAGAGTGCTAA | CBE | 1249 |
| Gln-CTG-1-2 | | | |
| Homo_sapiens_tRNA- | ATTCAGAGTCCAGAGTGCTA | CBE | 1250 |
| Gln-CTG-1-2 | | | |
| Homo_sapiens_tRNA- | GATTCAGAGTCCAGAGTGCT | CBE | 1251 |
| Gln-CTG-1-2 | | | |
| Homo_sapiens_tRNA- | GGATTCAGAGTCCAGAGTGC | CBE | 1252 |
| Gln-CTG-1-2 | | | |
| Homo_sapiens_tRNA- | TGGATTCAGAGTCCAGAGTG | CBE | 1253 |
| Gln-CTG-1-2 | | | |
| Homo_sapiens_tRNA- | CTGGATTCAGAGTCCAGAGT | CBE | 1254 |
| Gln-CTG-1-2 | | | |
| Homo_sapiens_tRNA- | GCTGGATTCAGAGTCCAGAG | CBE | 1255 |
| Gln-CTG-1-2 | | | |
| Homo_sapiens_tRNA- | CGCTGGATTCAGAGTCCAGA | CBE | 1256 |
| Gln-CTG-1-2 | | | |
| Homo_sapiens_tRNA- | TCGCTGGATTCAGAGTCCAG | CBE | 1257 |
| Gln-CTG-1-2 | | | |
| Homo_sapiens_tRNA- | ATCGCTGGATTCAGAGTCCA | CBE | 1258 |
| Gln-CTG-1-2 | | | |
| Homo_sapiens_tRNA- | GATCGCTGGATTCAGAGTCC | CBE | 1259 |
| Gln-CTG-1-2 | | | |
| Homo_sapiens_tRNA- | GGATCGCTGGATTCAGAGTC | CBE | 1260 |
| Gln-CTG-1-2 | | | |
| Homo_sapiens_tRNA- | CGGATCGCTGGATTCAGAGT | CBE | 1261 |
| Gln-CTG-1-2 | | | |
| Homo_sapiens_tRNA- | TCGGATCGCTGGATTCAGAG | CBE | 1262 |
| Gln-CTG-1-2 | | | |
| Homo_sapiens_tRNA- | GAGTCCAGAGTGCTAACCAT | CBE | 1263 |
| Gln-CTG-1-3 | | | |
| Homo_sapiens_tRNA- | AGAGTCCAGAGTGCTAACCA | CBE | 1264 |
| Gln-CTG-1-3 | | | |
| Homo_sapiens_tRNA- | CAGAGTCCAGAGTGCTAACC | CBE | 1265 |
| Gln-CTG-1-3 | | | |
| Homo_sapiens_tRNA- | TCAGAGTCCAGAGTGCTAAC | CBE | 1266 |
| Gln-CTG-1-3 | | | |
| Homo_sapiens_tRNA- | TTCAGAGTCCAGAGTGCTAA | CBE | 1267 |
| Gln-CTG-1-3 | | | |
| Homo_sapiens_tRNA- | ATTCAGAGTCCAGAGTGCTA | CBE | 1268 |
| Gln-CTG-1-3 | | | |
| Homo_sapiens_tRNA- | GATTCAGAGTCCAGAGTGCT | CBE | 1269 |
| Gln-CTG-1-3 | | | |
| Homo_sapiens_tRNA- | GGATTCAGAGTCCAGAGTGC | CBE | 1270 |
| Gln-CTG-1-3 | | | |
| Homo_sapiens_tRNA- | TGGATTCAGAGTCCAGAGTG | CBE | 1271 |
| Gln-CTG-1-3 | | | |
| Homo_sapiens_tRNA- | CTGGATTCAGAGTCCAGAGT | CBE | 1272 |
| Gln-CTG-1-3 | | | |
| Homo_sapiens_tRNA- | GCTGGATTCAGAGTCCAGAG | CBE | 1273 |
| Gln-CTG-1-3 | | | |
| Homo_sapiens_tRNA- | CGCTGGATTCAGAGTCCAGA | CBE | 1274 |
| Gln-CTG-1-3 | | | |
| Homo_sapiens_tRNA- | TCGCTGGATTCAGAGTCCAG | CBE | 1275 |
| Gln-CTG-1-3 | | | |
| Homo_sapiens_tRNA- | ATCGCTGGATTCAGAGTCCA | CBE | 1276 |
| Gln-CTG-1-3 | | | |
| Homo_sapiens_tRNA- | GATCGCTGGATTCAGAGTCC | CBE | 1277 |
| Gln-CTG-1-3 | | | |
| Homo_sapiens_tRNA- | GGATCGCTGGATTCAGAGTC | CBE | 1278 |
| Gln-CTG-1-3 | | | |
| Homo_sapiens_tRNA- | CGGATCGCTGGATTCAGAGT | CBE | 1279 |
| Gln-CTG-1-3 | | | |
| Homo_sapiens_tRNA- | TCGGATCGCTGGATTCAGAG | CBE | 1280 |
| Gln-CTG-1-3 | | | |
| Homo_sapiens_tRNA- | GAGTCCAGAGTGCTAACCAT | CBE | 1281 |
| Gln-CTG-1-4 | | | |
| Homo_sapiens_tRNA- | AGAGTCCAGAGTGCTAACCA | CBE | 1282 |
| Gln-CTG-1-4 | | | |
| Homo_sapiens_tRNA- | CAGAGTCCAGAGTGCTAACC | CBE | 1283 |
| Gln-CTG-1-4 | | | |
| Homo_sapiens_tRNA- | TCAGAGTCCAGAGTGCTAAC | CBE | 1284 |
| Gln-CTG-1-4 | | | |
| Homo_sapiens_tRNA- | TTCAGAGTCCAGAGTGCTAA | CBE | 1285 |
| Gln-CTG-1-4 | | | |
| Homo_sapiens_tRNA- | ATTCAGAGTCCAGAGTGCTA | CBE | 1286 |
| Gln-CTG-1-4 | | | |
| Homo_sapiens_tRNA- | GATTCAGAGTCCAGAGTGCT | CBE | 1287 |
| Gln-CTG-1-4 | | | |
| Homo_sapiens_tRNA- | GGATTCAGAGTCCAGAGTGC | CBE | 1288 |
| Gln-CTG-1-4 | | | |
| Homo_sapiens_tRNA- | TGGATTCAGAGTCCAGAGTG | CBE | 1289 |
| Gln-CTG-1-4 | | | |
| Homo_sapiens_tRNA- | CTGGATTCAGAGTCCAGAGT | CBE | 1290 |
| Gln-CTG-1-4 | | | |
| Homo_sapiens_tRNA- | GCTGGATTCAGAGTCCAGAG | CBE | 1291 |
| Gln-CTG-1-4 | | | |
| Homo_sapiens_tRNA- | CGCTGGATTCAGAGTCCAGA | CBE | 1292 |
| Gln-CTG-1-4 | | | |
| Homo_sapiens_tRNA- | TCGCTGGATTCAGAGTCCAG | CBE | 1293 |
| Gln-CTG-1-4 | | | |
| Homo_sapiens_tRNA- | ATCGCTGGATTCAGAGTCCA | CBE | 1294 |
| Gln-CTG-1-4 | | | |
| Homo_sapiens_tRNA- | GATCGCTGGATTCAGAGTCC | CBE | 1295 |
| Gln-CTG-1-4 | | | |
| Homo_sapiens_tRNA- | GGATCGCTGGATTCAGAGTC | CBE | 1296 |
| Gln-CTG-1-4 | | | |
| Homo_sapiens_tRNA- | CGGATCGCTGGATTCAGAGT | CBE | 1297 |
| Gln-CTG-1-4 | | | |
| Homo_sapiens_tRNA- | TCGGATCGCTGGATTCAGAG | CBE | 1298 |
| Gln-CTG-1-4 | | | |
| Homo_sapiens_tRNA- | GAGTCCAGAGTGCTAACCAT | CBE | 1299 |
| Gln-CTG-1-5 | | | |
| Homo_sapiens_tRNA- | AGAGTCCAGAGTGCTAACCA | CBE | 1300 |
| Gln-CTG-1-5 | | | |
| Homo_sapiens_tRNA- | CAGAGTCCAGAGTGCTAACC | CBE | 1301 |
| Gln-CTG-1-5 | | | |
| Homo_sapiens_tRNA- | TCAGAGTCCAGAGTGCTAAC | CBE | 1302 |
| Gln-CTG-1-5 | | | |
| Homo_sapiens_tRNA- | TTCAGAGTCCAGAGTGCTAA | CBE | 1303 |
| Gln-CTG-1-5 | | | |
| Homo_sapiens_tRNA- | ATTCAGAGTCCAGAGTGCTA | CBE | 1304 |
| Gln-CTG-1-5 | | | |
| Homo_sapiens_tRNA- | GATTCAGAGTCCAGAGTGCT | CBE | 1305 |
| Gln-CTG-1-5 | | | |
| Homo_sapiens_tRNA- | GGATTCAGAGTCCAGAGTGC | CBE | 1306 |
| Gln-CTG-1-5 | | | |
| Homo_sapiens_tRNA- | TGGATTCAGAGTCCAGAGTG | CBE | 1307 |
| Gln-CTG-1-5 | | | |
| Homo_sapiens_tRNA- | CTGGATTCAGAGTCCAGAGT | CBE | 1308 |
| Gln-CTG-1-5 | | | |
| Homo_sapiens_tRNA- | GCTGGATTCAGAGTCCAGAG | CBE | 1309 |
| Gln-CTG-1-5 | | | |
| Homo_sapiens_tRNA- | CGCTGGATTCAGAGTCCAGA | CBE | 1310 |
| Gln-CTG-1-5 | | | |
| Homo_sapiens_tRNA- | TCGCTGGATTCAGAGTCCAG | CBE | 1311 |
| Gln-CTG-1-5 | | | |
| Homo_sapiens_tRNA- | ATCGCTGGATTCAGAGTCCA | CBE | 1312 |
| Gln-CTG-1-5 | | | |
| Homo_sapiens_tRNA- | GATCGCTGGATTCAGAGTCC | CBE | 1313 |
| Gln-CTG-1-5 | | | |
| Homo_sapiens_tRNA- | GGATCGCTGGATTCAGAGTC | CBE | 1314 |
| Gln-CTG-1-5 | | | |
| Homo_sapiens_tRNA- | CGGATCGCTGGATTCAGAGT | CBE | 1315 |
| Gln-CTG-1-5 | | | |
| Homo_sapiens_tRNA- | TCGGATCGCTGGATTCAGAG | CBE | 1316 |
| Gln-CTG-1-5 | | | |
| Homo_sapiens_tRNA- | GAGTCCAGAGTGCTAACCAT | CBE | 1317 |
| Gln-CTG-2-1 | | | |
| Homo_sapiens_tRNA- | AGAGTCCAGAGTGCTAACCA | CBE | 1318 |
| Gln-CTG-2-1 | | | |
| Homo_sapiens_tRNA- | CAGAGTCCAGAGTGCTAACC | CBE | 1319 |
| Gln-CTG-2-1 | | | |
| Homo_sapiens_tRNA- | TCAGAGTCCAGAGTGCTAAC | CBE | 1320 |
| Gln-CTG-2-1 | | | |
| Homo_sapiens_tRNA- | TTCAGAGTCCAGAGTGCTAA | CBE | 1321 |
| Gln-CTG-2-1 | | | |
| Homo_sapiens_tRNA- | ATTCAGAGTCCAGAGTGCTA | CBE | 1322 |
| Gln-CTG-2-1 | | | |
| Homo_sapiens_tRNA- | GATTCAGAGTCCAGAGTGCT | CBE | 1323 |
| Gln-CTG-2-1 | | | |
| Homo_sapiens_tRNA- | GGATTCAGAGTCCAGAGTGC | CBE | 1324 |
| Gln-CTG-2-1 | | | |
| Homo_sapiens_tRNA- | TGGATTCAGAGTCCAGAGTG | CBE | 1325 |
| Gln-CTG-2-1 | | | |
| Homo_sapiens_tRNA- | CTGGATTCAGAGTCCAGAGT | CBE | 1326 |
| Gln-CTG-2-1 | | | |
| Homo_sapiens_tRNA- | GCTGGATTCAGAGTCCAGAG | CBE | 1327 |
| Gln-CTG-2-1 | | | |
| Homo_sapiens_tRNA- | CGCTGGATTCAGAGTCCAGA | CBE | 1328 |
| Gln-CTG-2-1 | | | |
| Homo_sapiens_tRNA- | TCGCTGGATTCAGAGTCCAG | CBE | 1329 |
| Gln-CTG-2-1 | | | |
| Homo_sapiens_tRNA- | ATCGCTGGATTCAGAGTCCA | CBE | 1330 |
| Gln-CTG-2-1 | | | |
| Homo_sapiens_tRNA- | GATCGCTGGATTCAGAGTCC | CBE | 1331 |
| Gln-CTG-2-1 | | | |
| Homo_sapiens_tRNA- | GGATCGCTGGATTCAGAGTC | CBE | 1332 |
| Gln-CTG-2-1 | | | |
| Homo_sapiens_tRNA- | CGGATCGCTGGATTCAGAGT | CBE | 1333 |
| Gln-CTG-2-1 | | | |
| Homo_sapiens_tRNA- | TCGGATCGCTGGATTCAGAG | CBE | 1334 |
| Gln-CTG-2-1 | | | |
| Homo_sapiens_tRNA- | GAGTCCAGAGTGCTCACCAT | CBE | 1335 |
| Gln-CTG-3-1 | | | |
| Homo_sapiens_tRNA- | AGAGTCCAGAGTGCTCACCA | CBE | 1336 |
| Gln-CTG-3-1 | | | |
| Homo_sapiens_tRNA- | CAGAGTCCAGAGTGCTCACC | CBE | 1337 |
| Gln-CTG-3-1 | | | |
| Homo_sapiens_tRNA- | TCAGAGTCCAGAGTGCTCAC | CBE | 1338 |
| Gln-CTG-3-1 | | | |
| Homo_sapiens_tRNA- | TTCAGAGTCCAGAGTGCTCA | CBE | 1339 |
| Gln-CTG-3-1 | | | |
| Homo_sapiens_tRNA- | ATTCAGAGTCCAGAGTGCTC | CBE | 1340 |
| Gln-CTG-3-1 | | | |
| Homo_sapiens_tRNA- | GATTCAGAGTCCAGAGTGCT | CBE | 1341 |
| Gln-CTG-3-1 | | | |
| Homo_sapiens_tRNA- | GGATTCAGAGTCCAGAGTGC | CBE | 1342 |
| Gln-CTG-3-1 | | | |
| Homo_sapiens_tRNA- | TGGATTCAGAGTCCAGAGTG | CBE | 1343 |
| Gln-CTG-3-1 | | | |
| Homo_sapiens_tRNA- | CTGGATTCAGAGTCCAGAGT | CBE | 1344 |
| Gln-CTG-3-1 | | | |
| Homo_sapiens_tRNA- | GCTGGATTCAGAGTCCAGAG | CBE | 1345 |
| Gln-CTG-3-1 | | | |
| Homo_sapiens_tRNA- | CGCTGGATTCAGAGTCCAGA | CBE | 1346 |
| Gln-CTG-3-1 | | | |
| Homo_sapiens_tRNA- | TCGCTGGATTCAGAGTCCAG | CBE | 1347 |
| Gln-CTG-3-1 | | | |
| Homo_sapiens_tRNA- | ATCGCTGGATTCAGAGTCCA | CBE | 1348 |
| Gln-CTG-3-1 | | | |
| Homo_sapiens_tRNA- | GATCGCTGGATTCAGAGTCC | CBE | 1349 |
| Gln-CTG-3-1 | | | |
| Homo_sapiens_tRNA- | GGATCGCTGGATTCAGAGTC | CBE | 1350 |
| Gln-CTG-3-1 | | | |
| Homo_sapiens_tRNA- | CGGATCGCTGGATTCAGAGT | CBE | 1351 |
| Gln-CTG-3-1 | | | |
| Homo_sapiens_tRNA- | TCGGATCGCTGGATTCAGAG | CBE | 1352 |
| Gln-CTG-3-1 | | | |
| Homo_sapiens_tRNA- | GAGTCCAGAGTGCTCACCAT | CBE | 1353 |
| Gln-CTG-3-2 | | | |
| Homo_sapiens_tRNA- | AGAGTCCAGAGTGCTCACCA | CBE | 1354 |
| Gln-CTG-3-2 | | | |
| Homo_sapiens_tRNA- | CAGAGTCCAGAGTGCTCACC | CBE | 1355 |
| Gln-CTG-3-2 | | | |
| Homo_sapiens_tRNA- | TCAGAGTCCAGAGTGCTCAC | CBE | 1356 |
| Gln-CTG-3-2 | | | |
| Homo_sapiens_tRNA- | TTCAGAGTCCAGAGTGCTCA | CBE | 1357 |
| Gln-CTG-3-2 | | | |
| Homo_sapiens_tRNA- | ATTCAGAGTCCAGAGTGCTC | CBE | 1358 |
| Gln-CTG-3-2 | | | |
| Homo_sapiens_tRNA- | GATTCAGAGTCCAGAGTGCT | CBE | 1359 |
| Gln-CTG-3-2 | | | |
| Homo_sapiens_tRNA- | GGATTCAGAGTCCAGAGTGC | CBE | 1360 |
| Gln-CTG-3-2 | | | |
| Homo_sapiens_tRNA- | TGGATTCAGAGTCCAGAGTG | CBE | 1361 |
| Gln-CTG-3-2 | | | |
| Homo_sapiens_tRNA- | CTGGATTCAGAGTCCAGAGT | CBE | 1362 |
| Gln-CTG-3-2 | | | |
| Homo_sapiens_tRNA- | GCTGGATTCAGAGTCCAGAG | CBE | 1363 |
| Gln-CTG-3-2 | | | |
| Homo_sapiens_tRNA- | CGCTGGATTCAGAGTCCAGA | CBE | 1364 |
| Gln-CTG-3-2 | | | |
| Homo_sapiens_tRNA- | TCGCTGGATTCAGAGTCCAG | CBE | 1365 |
| Gln-CTG-3-2 | | | |
| Homo_sapiens_tRNA- | ATCGCTGGATTCAGAGTCCA | CBE | 1366 |
| Gln-CTG-3-2 | | | |
| Homo_sapiens_tRNA- | GATCGCTGGATTCAGAGTCC | CBE | 1367 |
| Gln-CTG-3-2 | | | |
| Homo_sapiens_tRNA- | GGATCGCTGGATTCAGAGTC | CBE | 1368 |
| Gln-CTG-3-2 | | | |
| Homo_sapiens_tRNA- | CGGATCGCTGGATTCAGAGT | CBE | 1369 |
| Gln-CTG-3-2 | | | |
| Homo_sapiens_tRNA- | TCGGATCGCTGGATTCAGAG | CBE | 1370 |
| Gln-CTG-3-2 | | | |
| Homo_sapiens_tRNA- | GAGTCCAGAGTGCTTACCAT | CBE | 1371 |
| Gln-CTG-4-1 | | | |
| Homo_sapiens_tRNA- | AGAGTCCAGAGTGCTTACCA | CBE | 1372 |
| Gln-CTG-4-1 | | | |
| Homo_sapiens_tRNA- | CAGAGTCCAGAGTGCTTACC | CBE | 1373 |
| Gln-CTG-4-1 | | | |
| Homo_sapiens_tRNA- | TCAGAGTCCAGAGTGCTTAC | CBE | 1374 |
| Gln-CTG-4-1 | | | |
| Homo_sapiens_tRNA- | TTCAGAGTCCAGAGTGCTTA | CBE | 1375 |
| Gln-CTG-4-1 | | | |
| Homo_sapiens_tRNA- | ATTCAGAGTCCAGAGTGCTT | CBE | 1376 |
| Gln-CTG-4-1 | | | |
| Homo_sapiens_tRNA- | GATTCAGAGTCCAGAGTGCT | CBE | 1377 |
| Gln-CTG-4-1 | | | |
| Homo_sapiens_tRNA- | GGATTCAGAGTCCAGAGTGC | CBE | 1378 |
| Gln-CTG-4-1 | | | |
| Homo_sapiens_tRNA- | TGGATTCAGAGTCCAGAGTG | CBE | 1379 |
| Gln-CTG-4-1 | | | |
| Homo_sapiens_tRNA- | CTGGATTCAGAGTCCAGAGT | CBE | 1380 |
| Gln-CTG-4-1 | | | |
| Homo_sapiens_tRNA- | GCTGGATTCAGAGTCCAGAG | CBE | 1381 |
| Gln-CTG-4-1 | | | |
| Homo_sapiens_tRNA- | CGCTGGATTCAGAGTCCAGA | CBE | 1382 |
| Gln-CTG-4-1 | | | |
| Homo_sapiens_tRNA- | TCGCTGGATTCAGAGTCCAG | CBE | 1383 |
| Gln-CTG-4-1 | | | |
| Homo_sapiens_tRNA- | ATCGCTGGATTCAGAGTCCA | CBE | 1384 |
| Gln-CTG-4-1 | | | |
| Homo_sapiens_tRNA- | GATCGCTGGATTCAGAGTCC | CBE | 1385 |
| Gln-CTG-4-1 | | | |
| Homo_sapiens_tRNA- | GGATCGCTGGATTCAGAGTC | CBE | 1386 |
| Gln-CTG-4-1 | | | |
| Homo_sapiens_tRNA- | CGGATCGCTGGATTCAGAGT | CBE | 1387 |
| Gln-CTG-4-1 | | | |
| Homo_sapiens_tRNA- | TCGGATCGCTGGATTCAGAG | CBE | 1388 |
| Gln-CTG-4-1 | | | |
| Homo_sapiens_tRNA- | GAGTCCAGAGTGCTTACCAT | CBE | 1389 |
| Gln-CTG-4-2 | | | |
| Homo_sapiens_tRNA- | AGAGTCCAGAGTGCTTACCA | CBE | 1390 |
| Gln-CTG-4-2 | | | |
| Homo_sapiens_tRNA- | CAGAGTCCAGAGTGCTTACC | CBE | 1391 |
| Gln-CTG-4-2 | | | |
| Homo_sapiens_tRNA- | TCAGAGTCCAGAGTGCTTAC | CBE | 1392 |
| Gln-CTG-4-2 | | | |
| Homo_sapiens_tRNA- | TTCAGAGTCCAGAGTGCTTA | CBE | 1393 |
| Gln-CTG-4-2 | | | |
| Homo_sapiens_tRNA- | ATTCAGAGTCCAGAGTGCTT | CBE | 1394 |
| Gln-CTG-4-2 | | | |
| Homo_sapiens_tRNA- | GATTCAGAGTCCAGAGTGCT | CBE | 1395 |
| Gln-CTG-4-2 | | | |
| Homo_sapiens_tRNA- | GGATTCAGAGTCCAGAGTGC | CBE | 1396 |
| Gln-CTG-4-2 | | | |
| Homo_sapiens_tRNA- | TGGATTCAGAGTCCAGAGTG | CBE | 1397 |
| Gln-CTG-4-2 | | | |
| Homo_sapiens_tRNA- | CTGGATTCAGAGTCCAGAGT | CBE | 1398 |
| Gln-CTG-4-2 | | | |
| Homo_sapiens_tRNA- | GCTGGATTCAGAGTCCAGAG | CBE | 1399 |
| Gln-CTG-4-2 | | | |
| Homo_sapiens_tRNA- | CGCTGGATTCAGAGTCCAGA | CBE | 1400 |
| Gln-CTG-4-2 | | | |
| Homo_sapiens_tRNA- | TCGCTGGATTCAGAGTCCAG | CBE | 1401 |
| Gln-CTG-4-2 | | | |
| Homo_sapiens_tRNA- | ATCGCTGGATTCAGAGTCCA | CBE | 1402 |
| Gln-CTG-4-2 | | | |
| Homo_sapiens_tRNA- | GATCGCTGGATTCAGAGTCC | CBE | 1403 |
| Gln-CTG-4-2 | | | |
| Homo_sapiens_tRNA- | GGATCGCTGGATTCAGAGTC | CBE | 1404 |
| Gln-CTG-4-2 | | | |
| Homo_sapiens_tRNA- | CGGATCGCTGGATTCAGAGT | CBE | 1405 |
| Gln-CTG-4-2 | | | |
| Homo_sapiens_tRNA- | TCGGATCGCTGGATTCAGAG | CBE | 1406 |
| Gln-CTG-4-2 | | | |
| Homo_sapiens_tRNA- | GAGTCCAGAGTGCTAACCAT | CBE | 1407 |
| Gln-CTG-5-1 | | | |
| Homo_sapiens_tRNA- | AGAGTCCAGAGTGCTAACCA | CBE | 1408 |
| Gln-CTG-5-1 | | | |
| Homo_sapiens_tRNA- | CAGAGTCCAGAGTGCTAACC | CBE | 1409 |
| Gln-CTG-5-1 | | | |
| Homo_sapiens_tRNA- | TCAGAGTCCAGAGTGCTAAC | CBE | 1410 |
| Gln-CTG-5-1 | | | |
| Homo_sapiens_tRNA- | TTCAGAGTCCAGAGTGCTAA | CBE | 1411 |
| Gln-CTG-5-1 | | | |
| Homo_sapiens_tRNA- | ATTCAGAGTCCAGAGTGCTA | CBE | 1412 |
| Gln-CTG-5-1 | | | |
| Homo_sapiens_tRNA- | GATTCAGAGTCCAGAGTGCT | CBE | 1413 |
| Gln-CTG-5-1 | | | |
| Homo_sapiens_tRNA- | GGATTCAGAGTCCAGAGTGC | CBE | 1414 |
| Gln-CTG-5-1 | | | |
| Homo_sapiens_tRNA- | CGGATTCAGAGTCCAGAGTG | CBE | 1415 |
| Gln-CTG-5-1 | | | |
| Homo_sapiens_tRNA- | CCGGATTCAGAGTCCAGAGT | CBE | 1416 |
| Gln-CTG-5-1 | | | |
| Homo_sapiens_tRNA- | ACCGGATTCAGAGTCCAGAG | CBE | 1417 |
| Gln-CTG-5-1 | | | |
| Homo_sapiens_tRNA- | TACCGGATTCAGAGTCCAGA | CBE | 1418 |
| Gln-CTG-5-1 | | | |
| Homo_sapiens_tRNA- | TTACCGGATTCAGAGTCCAG | CBE | 1419 |
| Gln-CTG-5-1 | | | |
| Homo_sapiens_tRNA- | ATTACCGGATTCAGAGTCCA | CBE | 1420 |
| Gln-CTG-5-1 | | | |
| Homo_sapiens_tRNA- | GATTACCGGATTCAGAGTCC | CBE | 1421 |
| Gln-CTG-5-1 | | | |
| Homo_sapiens_tRNA- | GGATTACCGGATTCAGAGTC | CBE | 1422 |
| Gln-CTG-5-1 | | | |
| Homo_sapiens_tRNA- | CGGATTACCGGATTCAGAGT | CBE | 1423 |
| Gln-CTG-5-1 | | | |
| Homo_sapiens_tRNA- | TCGGATTACCGGATTCAGAG | CBE | 1424 |
| Gln-CTG-5-1 | | | |
| Homo_sapiens_tRNA- | GAGTCCAGAGTGCTGACCAT | CBE | 1425 |
| Gln-CTG-6-1 | | | |
| Homo_sapiens_tRNA- | AGAGTCCAGAGTGCTGACCA | CBE | 1426 |
| Gln-CTG-6-1 | | | |
| Homo_sapiens_tRNA- | CAGAGTCCAGAGTGCTGACC | CBE | 1427 |
| Gln-CTG-6-1 | | | |
| Homo_sapiens_tRNA- | TCAGAGTCCAGAGTGCTGAC | CBE | 1428 |
| Gln-CTG-6-1 | | | |
| Homo_sapiens_tRNA- | TTCAGAGTCCAGAGTGCTGA | CBE | 1429 |
| Gln-CTG-6-1 | | | |
| Homo_sapiens_tRNA- | ATTCAGAGTCCAGAGTGCTG | CBE | 1430 |
| Gln-CTG-6-1 | | | |
| Homo_sapiens_tRNA- | GATTCAGAGTCCAGAGTGCT | CBE | 1431 |
| Gln-CTG-6-1 | | | |
| Homo_sapiens_tRNA- | GGATTCAGAGTCCAGAGTGC | CBE | 1432 |
| Gln-CTG-6-1 | | | |
| Homo_sapiens_tRNA- | TGGATTCAGAGTCCAGAGTG | CBE | 1433 |
| Gln-CTG-6-1 | | | |
| Homo_sapiens_tRNA- | CTGGATTCAGAGTCCAGAGT | CBE | 1434 |
| Gln-CTG-6-1 | | | |
| Homo_sapiens_tRNA- | GCTGGATTCAGAGTCCAGAG | CBE | 1435 |
| Gln-CTG-6-1 | | | |
| Homo_sapiens_tRNA- | CGCTGGATTCAGAGTCCAGA | CBE | 1436 |
| Gln-CTG-6-1 | | | |
| Homo_sapiens_tRNA- | TCGCTGGATTCAGAGTCCAG | CBE | 1437 |
| Gln-CTG-6-1 | | | |
| Homo_sapiens_tRNA- | ATCGCTGGATTCAGAGTCCA | CBE | 1438 |
| Gln-CTG-6-1 | | | |
| Homo_sapiens_tRNA- | GATCGCTGGATTCAGAGTCC | CBE | 1439 |
| Gln-CTG-6-1 | | | |
| Homo_sapiens_tRNA- | GGATCGCTGGATTCAGAGTC | CBE | 1440 |
| Gln-CTG-6-1 | | | |
| Homo_sapiens_tRNA- | CGGATCGCTGGATTCAGAGT | CBE | 1441 |
| Gln-CTG-6-1 | | | |
| Homo_sapiens_tRNA- | TCGGATCGCTGGATTCAGAG | CBE | 1442 |
| Gln-CTG-6-1 | | | |
| Homo_sapiens_tRNA- | GAGTCCAGAGTGCTTACCAT | CBE | 1443 |
| Gln-CTG-7-1 | | | |
| Homo_sapiens_tRNA- | AGAGTCCAGAGTGCTTACCA | CBE | 1444 |
| Gln-CTG-7-1 | | | |
| Homo_sapiens_tRNA- | CAGAGTCCAGAGTGCTTACC | CBE | 1445 |
| Gln-CTG-7-1 | | | |
| Homo_sapiens_tRNA- | TCAGAGTCCAGAGTGCTTAC | CBE | 1446 |
| Gln-CTG-7-1 | | | |
| Homo_sapiens_tRNA- | TTCAGAGTCCAGAGTGCTTA | CBE | 1447 |
| Gln-CTG-7-1 | | | |
| Homo_sapiens_tRNA- | ATTCAGAGTCCAGAGTGCTT | CBE | 1448 |
| Gln-CTG-7-1 | | | |
| Homo_sapiens_tRNA- | GATTCAGAGTCCAGAGTGCT | CBE | 1449 |
| Gln-CTG-7-1 | | | |
| Homo_sapiens_tRNA- | GGATTCAGAGTCCAGAGTGC | CBE | 1450 |
| Gln-CTG-7-1 | | | |
| Homo_sapiens_tRNA- | TGGATTCAGAGTCCAGAGTG | CBE | 1451 |
| Gln-CTG-7-1 | | | |
| Homo_sapiens_tRNA- | CTGGATTCAGAGTCCAGAGT | CBE | 1452 |
| Gln-CTG-7-1 | | | |
| Homo_sapiens_tRNA- | GCTGGATTCAGAGTCCAGAG | CBE | 1453 |
| Gln-CTG-7-1 | | | |
| Homo_sapiens_tRNA- | GGCTGGATTCAGAGTCCAGA | CBE | 1454 |
| Gln-CTG-7-1 | | | |
| Homo_sapiens_tRNA- | TGGCTGGATTCAGAGTCCAG | CBE | 1455 |
| Gln-CTG-7-1 | | | |
| Homo_sapiens_tRNA- | ATGGCTGGATTCAGAGTCCA | CBE | 1456 |
| Gln-CTG-7-1 | | | |
| Homo_sapiens_tRNA- | GATGGCTGGATTCAGAGTCC | CBE | 1457 |
| Gln-CTG-7-1 | | | |
| Homo_sapiens_tRNA- | AGATGGCTGGATTCAGAGTC | CBE | 1458 |
| Gln-CTG-7-1 | | | |
| Homo_sapiens_tRNA- | CAGATGGCTGGATTCAGAGT | CBE | 1459 |
| Gln-CTG-7-1 | | | |
| Homo_sapiens_tRNA- | TCAGATGGCTGGATTCAGAG | CBE | 1460 |
| Gln-CTG-7-1 | | | |
| Homo_sapiens_tRNA- | AAGTCCAGAGTGCTAACCAT | CBE | 1461 |
| Gln-TTG-1-1 | | | |
| Homo_sapiens_tRNA- | AAAGTCCAGAGTGCTAACCA | CBE | 1462 |
| Gln-TTG-1-1 | | | |
| Homo_sapiens_tRNA- | CAAAGTCCAGAGTGCTAACC | CBE | 1463 |
| Gln-TTG-1-1 | | | |
| Homo_sapiens_tRNA- | TCAAAGTCCAGAGTGCTAAC | CBE | 1464 |
| Gln-TTG-1-1 | | | |
| Homo_sapiens_tRNA- | TTCAAAGTCCAGAGTGCTAA | CBE | 1465 |
| Gln-TTG-1-1 | | | |
| Homo_sapiens_tRNA- | ATTCAAAGTCCAGAGTGCTA | CBE | 1466 |
| Gln-TTG-1-1 | | | |
| Homo_sapiens_tRNA- | GATTCAAAGTCCAGAGTGCT | CBE | 1467 |
| Gln-TTG-1-1 | | | |
| Homo_sapiens_tRNA- | GGATTCAAAGTCCAGAGTGC | CBE | 1468 |
| Gln-TTG-1-1 | | | |
| Homo_sapiens_tRNA- | TGGATTCAAAGTCCAGAGTG | CBE | 1469 |
| Gln-TTG-1-1 | | | |
| Homo_sapiens_tRNA- | CTGGATTCAAAGTCCAGAGT | CBE | 1470 |
| Gln-TTG-1-1 | | | |
| Homo_sapiens_tRNA- | GCTGGATTCAAAGTCCAGAG | CBE | 1471 |
| Gln-TTG-1-1 | | | |
| Homo_sapiens_tRNA- | CGCTGGATTCAAAGTCCAGA | CBE | 1472 |
| Gln-TTG-1-1 | | | |
| Homo_sapiens_tRNA- | TCGCTGGATTCAAAGTCCAG | CBE | 1473 |
| Gln-TTG-1-1 | | | |
| Homo_sapiens_tRNA- | ATCGCTGGATTCAAAGTCCA | CBE | 1474 |
| Gln-TTG-1-1 | | | |
| Homo_sapiens_tRNA- | GATCGCTGGATTCAAAGTCC | CBE | 1475 |
| Gln-TTG-1-1 | | | |
| Homo_sapiens_tRNA- | GGATCGCTGGATTCAAAGTC | CBE | 1476 |
| Gln-TTG-1-1 | | | |
| Homo_sapiens_tRNA- | CGGATCGCTGGATTCAAAGT | CBE | 1477 |
| Gln-TTG-1-1 | | | |
| Homo_sapiens_tRNA- | TCGGATCGCTGGATTCAAAG | CBE | 1478 |
| Gln-TTG-1-1 | | | |
| Homo_sapiens_tRNA- | AAGTCCAGAGTGCTAACCAT | CBE | 1479 |
| Gln-TTG-2-1 | | | |
| Homo_sapiens_tRNA- | AAAGTCCAGAGTGCTAACCA | CBE | 1480 |
| Gln-TTG-2-1 | | | |
| Homo_sapiens_tRNA- | CAAAGTCCAGAGTGCTAACC | CBE | 1481 |
| Gln-TTG-2-1 | | | |
| Homo_sapiens_tRNA- | TCAAAGTCCAGAGTGCTAAC | CBE | 1482 |
| Gln-TTG-2-1 | | | |
| Homo_sapiens_tRNA- | TTCAAAGTCCAGAGTGCTAA | CBE | 1483 |
| Gln-TTG-2-1 | | | |
| Homo_sapiens_tRNA- | ATTCAAAGTCCAGAGTGCTA | CBE | 1484 |
| Gln-TTG-2-1 | | | |
| Homo_sapiens_tRNA- | GATTCAAAGTCCAGAGTGCT | CBE | 1485 |
| Gln-TTG-2-1 | | | |
| Homo_sapiens_tRNA- | GGATTCAAAGTCCAGAGTGC | CBE | 1486 |
| Gln-TTG-2-1 | | | |
| Homo_sapiens_tRNA- | TGGATTCAAAGTCCAGAGTG | CBE | 1487 |
| Gln-TTG-2-1 | | | |
| Homo_sapiens_tRNA- | CTGGATTCAAAGTCCAGAGT | CBE | 1488 |
| Gln-TTG-2-1 | | | |
| Homo_sapiens_tRNA- | GCTGGATTCAAAGTCCAGAG | CBE | 1489 |
| Gln-TTG-2-1 | | | |
| Homo_sapiens_tRNA- | TGCTGGATTCAAAGTCCAGA | CBE | 1490 |
| Gln-TTG-2-1 | | | |
| Homo_sapiens_tRNA- | TTGCTGGATTCAAAGTCCAG | CBE | 1491 |
| Gln-TTG-2-1 | | | |
| Homo_sapiens_tRNA- | ATTGCTGGATTCAAAGTCCA | CBE | 1492 |
| Gln-TTG-2-1 | | | |
| Homo_sapiens_tRNA- | GATTGCTGGATTCAAAGTCC | CBE | 1493 |
| Gln-TTG-2-1 | | | |
| Homo_sapiens_tRNA- | GGATTGCTGGATTCAAAGTC | CBE | 1494 |
| Gln-TTG-2-1 | | | |
| Homo_sapiens_tRNA- | CGGATTGCTGGATTCAAAGT | CBE | 1495 |
| Gln-TTG-2-1 | | | |
| Homo_sapiens_tRNA- | TCGGATTGCTGGATTCAAAG | CBE | 1496 |
| Gln-TTG-2-1 | | | |
| Homo_sapiens_tRNA- | AAGTCCAGAGTGCTAACCAT | CBE | 1497 |
| Gln-TTG-3-1 | | | |
| Homo_sapiens_tRNA- | AAAGTCCAGAGTGCTAACCA | CBE | 1498 |
| Gln-TTG-3-1 | | | |
| Homo_sapiens_tRNA- | CAAAGTCCAGAGTGCTAACC | CBE | 1499 |
| Gln-TTG-3-1 | | | |
| Homo_sapiens_tRNA- | TCAAAGTCCAGAGTGCTAAC | CBE | 1500 |
| Gln-TTG-3-1 | | | |
| Homo_sapiens_tRNA- | TTCAAAGTCCAGAGTGCTAA | CBE | 1501 |
| Gln-TTG-3-1 | | | |
| Homo_sapiens_tRNA- | ATTCAAAGTCCAGAGTGCTA | CBE | 1502 |
| Gln-TTG-3-1 | | | |
| Homo_sapiens_tRNA- | GATTCAAAGTCCAGAGTGCT | CBE | 1503 |
| Gln-TTG-3-1 | | | |
| Homo_sapiens_tRNA- | GGATTCAAAGTCCAGAGTGC | CBE | 1504 |
| Gln-TTG-3-1 | | | |
| Homo_sapiens_tRNA- | TGGATTCAAAGTCCAGAGTG | CBE | 1505 |
| Gln-TTG-3-1 | | | |
| Homo_sapiens_tRNA- | CTGGATTCAAAGTCCAGAGT | CBE | 1506 |
| Gln-TTG-3-1 | | | |
| Homo_sapiens_tRNA- | GCTGGATTCAAAGTCCAGAG | CBE | 1507 |
| Gln-TTG-3-1 | | | |
| Homo_sapiens_tRNA- | CGCTGGATTCAAAGTCCAGA | CBE | 1508 |
| Gln-TTG-3-1 | | | |
| Homo_sapiens_tRNA- | TCGCTGGATTCAAAGTCCAG | CBE | 1509 |
| Gln-TTG-3-1 | | | |
| Homo_sapiens_tRNA- | ATCGCTGGATTCAAAGTCCA | CBE | 1510 |
| Gln-TTG-3-1 | | | |
| Homo_sapiens_tRNA- | GATCGCTGGATTCAAAGTCC | CBE | 1511 |
| Gln-TTG-3-1 | | | |
| Homo_sapiens_tRNA- | GGATCGCTGGATTCAAAGTC | CBE | 1512 |
| Gln-TTG-3-1 | | | |
| Homo_sapiens_tRNA- | CGGATCGCTGGATTCAAAGT | CBE | 1513 |
| Gln-TTG-3-1 | | | |
| Homo_sapiens_tRNA- | TCGGATCGCTGGATTCAAAG | CBE | 1514 |
| Gln-TTG-3-1 | | | |
| Homo_sapiens_tRNA- | AAGTCCAGAGTGCTAACCAT | CBE | 1515 |
| Gln-TTG-3-2 | | | |
| Homo_sapiens_tRNA- | AAAGTCCAGAGTGCTAACCA | CBE | 1516 |
| Gln-TTG-3-2 | | | |
| Homo_sapiens_tRNA- | CAAAGTCCAGAGTGCTAACC | CBE | 1517 |
| Gln-TTG-3-2 | | | |
| Homo_sapiens_tRNA- | TCAAAGTCCAGAGTGCTAAC | CBE | 1518 |
| Gln-TTG-3-2 | | | |
| Homo_sapiens_tRNA- | TTCAAAGTCCAGAGTGCTAA | CBE | 1519 |
| Gln-TTG-3-2 | | | |
| Homo_sapiens_tRNA- | ATTCAAAGTCCAGAGTGCTA | CBE | 1520 |
| Gln-TTG-3-2 | | | |
| Homo_sapiens_tRNA- | GATTCAAAGTCCAGAGTGCT | CBE | 1521 |
| Gln-TTG-3-2 | | | |
| Homo_sapiens_tRNA- | GGATTCAAAGTCCAGAGTGC | CBE | 1522 |
| Gln-TTG-3-2 | | | |
| Homo_sapiens_tRNA- | TGGATTCAAAGTCCAGAGTG | CBE | 1523 |
| Gln-TTG-3-2 | | | |
| Homo_sapiens_tRNA- | CTGGATTCAAAGTCCAGAGT | CBE | 1524 |
| Gln-TTG-3-2 | | | |
| Homo_sapiens_tRNA- | GCTGGATTCAAAGTCCAGAG | CBE | 1525 |
| Gln-TTG-3-2 | | | |
| Homo_sapiens_tRNA- | CGCTGGATTCAAAGTCCAGA | CBE | 1526 |
| Gln-TTG-3-2 | | | |
| Homo_sapiens_tRNA- | TCGCTGGATTCAAAGTCCAG | CBE | 1527 |
| Gln-TTG-3-2 | | | |
| Homo_sapiens_tRNA- | ATCGCTGGATTCAAAGTCCA | CBE | 1528 |
| Gln-TTG-3-2 | | | |
| Homo_sapiens_tRNA- | GATCGCTGGATTCAAAGTCC | CBE | 1529 |
| Gln-TTG-3-2 | | | |
| Homo_sapiens_tRNA- | GGATCGCTGGATTCAAAGTC | CBE | 1530 |
| Gln-TTG-3-2 | | | |
| Homo_sapiens_tRNA- | CGGATCGCTGGATTCAAAGT | CBE | 1531 |
| Gln-TTG-3-2 | | | |
| Homo_sapiens_tRNA- | TCGGATCGCTGGATTCAAAG | CBE | 1532 |
| Gln-TTG-3-2 | | | |
| Homo_sapiens_tRNA- | AAGTCCAGAGTGCTAACCAT | CBE | 1533 |
| Gln-TTG-3-3 | | | |
| Homo_sapiens_tRNA- | AAAGTCCAGAGTGCTAACCA | CBE | 1534 |
| Gln-TTG-3-3 | | | |
| Homo_sapiens_tRNA- | CAAAGTCCAGAGTGCTAACC | CBE | 1535 |
| Gln-TTG-3-3 | | | |
| Homo_sapiens_tRNA- | TCAAAGTCCAGAGTGCTAAC | CBE | 1536 |
| Gln-TTG-3-3 | | | |
| Homo_sapiens_tRNA- | TTCAAAGTCCAGAGTGCTAA | CBE | 1537 |
| Gln-TTG-3-3 | | | |
| Homo_sapiens_tRNA- | ATTCAAAGTCCAGAGTGCTA | CBE | 1538 |
| Gln-TTG-3-3 | | | |
| Homo_sapiens_tRNA- | GATTCAAAGTCCAGAGTGCT | CBE | 1539 |
| Gln-TTG-3-3 | | | |
| Homo_sapiens_tRNA- | GGATTCAAAGTCCAGAGTGC | CBE | 1540 |
| Gln-TTG-3-3 | | | |
| Homo_sapiens_tRNA- | TGGATTCAAAGTCCAGAGTG | CBE | 1541 |
| Gln-TTG-3-3 | | | |
| Homo_sapiens_tRNA- | CTGGATTCAAAGTCCAGAGT | CBE | 1542 |
| Gln-TTG-3-3 | | | |
| Homo_sapiens_tRNA- | GCTGGATTCAAAGTCCAGAG | CBE | 1543 |
| Gln-TTG-3-3 | | | |
| Homo_sapiens_tRNA- | CGCTGGATTCAAAGTCCAGA | CBE | 1544 |
| Gln-TTG-3-3 | | | |
| Homo_sapiens_tRNA- | TCGCTGGATTCAAAGTCCAG | CBE | 1545 |
| Gln-TTG-3-3 | | | |
| Homo_sapiens_tRNA- | ATCGCTGGATTCAAAGTCCA | CBE | 1546 |
| Gln-TTG-3-3 | | | |
| Homo_sapiens_tRNA- | GATCGCTGGATTCAAAGTCC | CBE | 1547 |
| Gln-TTG-3-3 | | | |
| Homo_sapiens_tRNA- | GGATCGCTGGATTCAAAGTC | CBE | 1548 |
| Gln-TTG-3-3 | | | |
| Homo_sapiens_tRNA- | CGGATCGCTGGATTCAAAGT | CBE | 1549 |
| Gln-TTG-3-3 | | | |
| Homo_sapiens_tRNA- | TCGGATCGCTGGATTCAAAG | CBE | 1550 |
| Gln-TTG-3-3 | | | |
| Homo_sapiens_tRNA- | AAGCCCAGAGTGCTAACCAT | CBE | 1551 |
| Gln-TTG-4-1 | | | |
| Homo_sapiens_tRNA- | AAAGCCCAGAGTGCTAACCA | CBE | 1552 |
| Gln-TTG-4-1 | | | |
| Homo_sapiens_tRNA- | CAAAGCCCAGAGTGCTAACC | CBE | 1553 |
| Gln-TTG-4-1 | | | |
| Homo_sapiens_tRNA- | TCAAAGCCCAGAGTGCTAAC | CBE | 1554 |
| Gln-TTG-4-1 | | | |
| Homo_sapiens_tRNA- | TTCAAAGCCCAGAGTGCTAA | CBE | 1555 |
| Gln-TTG-4-1 | | | |
| Homo_sapiens_tRNA- | ATTCAAAGCCCAGAGTGCTA | CBE | 1556 |
| Gln-TTG-4-1 | | | |
| Homo_sapiens_tRNA- | GATTCAAAGCCCAGAGTGCT | CBE | 1557 |
| Gln-TTG-4-1 | | | |
| Homo_sapiens_tRNA- | GGATTCAAAGCCCAGAGTGC | CBE | 1558 |
| Gln-TTG-4-1 | | | |
| Homo_sapiens_tRNA- | TGGATTCAAAGCCCAGAGTG | CBE | 1559 |
| Gln-TTG-4-1 | | | |
| Homo_sapiens_tRNA- | CTGGATTCAAAGCCCAGAGT | CBE | 1560 |
| Gln-TTG-4-1 | | | |
| Homo_sapiens_tRNA- | GCTGGATTCAAAGCCCAGAG | CBE | 1561 |
| Gln-TTG-4-1 | | | |
| Homo_sapiens_tRNA- | TGCTGGATTCAAAGCCCAGA | CBE | 1562 |
| Gln-TTG-4-1 | | | |
| Homo_sapiens_tRNA- | TTGCTGGATTCAAAGCCCAG | CBE | 1563 |
| Gln-TTG-4-1 | | | |
| Homo_sapiens_tRNA- | ATTGCTGGATTCAAAGCCCA | CBE | 1564 |
| Gln-TTG-4-1 | | | |
| Homo_sapiens_tRNA- | GATTGCTGGATTCAAAGCCC | CBE | 1565 |
| Gln-TTG-4-1 | | | |
| Homo_sapiens_tRNA- | GGATTGCTGGATTCAAAGCC | CBE | 1566 |
| Gln-TTG-4-1 | | | |
| Homo_sapiens_tRNA- | CGGATTGCTGGATTCAAAGC | CBE | 1567 |
| Gln-TTG-4-1 | | | |
| Homo_sapiens_tRNA- | TCGGATTGCTGGATTCAAAG | CBE | 1568 |
| Gln-TTG-4-1 | | | |
| Homo_sapiens_tRNA- | GTGGTTAGGATTCGGCGCTC | CABE | 1569 |
| Glu-CTC-1-1 | | | |
| Homo_sapiens_tRNA- | TGGTTAGGATTCGGCGCTCT | CABE | 1570 |
| Glu-CTC-1-1 | | | |
| Homo_sapiens_tRNA- | GGTTAGGATTCGGCGCTCTC | CABE | 1571 |
| Glu-CTC-1-1 | | | |
| Homo_sapiens_tRNA- | GTTAGGATTCGGCGCTCTCA | CABE | 1572 |
| Glu-CTC-1-1 | | | |
| Homo_sapiens_tRNA- | TTAGGATTCGGCGCTCTCAC | CABE | 1573 |
| Glu-CTC-1-1 | | | |
| Homo_sapiens_tRNA- | TAGGATTCGGCGCTCTCACC | CABE | 1574 |
| Glu-CTC-1-1 | | | |
| Homo_sapiens_tRNA- | AGGATTCGGCGCTCTCACCG | CABE | 1575 |
| Glu-CTC-1-1 | | | |
| Homo_sapiens_tRNA- | GGATTCGGCGCTCTCACCGC | CABE | 1576 |
| Glu-CTC-1-1 | | | |
| Homo_sapiens_tRNA- | GATTCGGCGCTCTCACCGCC | CABE | 1577 |
| Glu-CTC-1-1 | | | |
| Homo_sapiens_tRNA- | ATTCGGCGCTCTCACCGCCG | CABE | 1578 |
| Glu-CTC-1-1 | | | |
| Homo_sapiens_tRNA- | TTCGGCGCTCTCACCGCCGC | CABE | 1579 |
| Glu-CTC-1-1 | | | |
| Homo_sapiens_tRNA- | TCGGCGCTCTCACCGCCGCG | CABE | 1580 |
| Glu-CTC-1-1 | | | |
| Homo_sapiens_tRNA- | CGGCGCTCTCACCGCCGCGG | CABE | 1581 |
| Glu-CTC-1-1 | | | |
| Homo_sapiens_tRNA- | GGCGCTCTCACCGCCGCGGC | CABE | 1582 |
| Glu-CTC-1-1 | | | |
| Homo_sapiens_tRNA- | GCGCTCTCACCGCCGCGGCC | CABE | 1583 |
| Glu-CTC-1-1 | | | |
| Homo_sapiens_tRNA- | CGCTCTCACCGCCGCGGCCC | CABE | 1584 |
| Glu-CTC-1-1 | | | |
| Homo_sapiens_tRNA- | GCTCTCACCGCCGCGGCCCG | CABE | 1585 |
| Glu-CTC-1-1 | | | |
| Homo_sapiens_tRNA- | CTCTCACCGCCGCGGCCCGG | CABE | 1586 |
| Glu-CTC-1-1 | | | |
| Homo_sapiens_tRNA- | GTGGTTAGGATTCGGCGCTC | CABE | 1587 |
| Glu-CTC-1-2 | | | |
| Homo_sapiens_tRNA- | TGGTTAGGATTCGGCGCTCT | CABE | 1588 |
| Glu-CTC-1-2 | | | |
| Homo_sapiens_tRNA- | GGTTAGGATTCGGCGCTCTC | CABE | 1589 |
| Glu-CTC-1-2 | | | |
| Homo_sapiens_tRNA- | GTTAGGATTCGGCGCTCTCA | CABE | 1590 |
| Glu-CTC-1-2 | | | |
| Homo_sapiens_tRNA- | TTAGGATTCGGCGCTCTCAC | CABE | 1591 |
| Glu-CTC-1-2 | | | |
| Homo_sapiens_tRNA- | TAGGATTCGGCGCTCTCACC | CABE | 1592 |
| Glu-CTC-1-2 | | | |
| Homo_sapiens_tRNA- | AGGATTCGGCGCTCTCACCG | CABE | 1593 |
| Glu-CTC-1-2 | | | |
| Homo_sapiens_tRNA- | GGATTCGGCGCTCTCACCGC | CABE | 1594 |
| Glu-CTC-1-2 | | | |
| Homo_sapiens_tRNA- | GATTCGGCGCTCTCACCGCC | CABE | 1595 |
| Glu-CTC-1-2 | | | |
| Homo_sapiens_tRNA- | ATTCGGCGCTCTCACCGCCG | CABE | 1596 |
| Glu-CTC-1-2 | | | |
| Homo_sapiens_tRNA- | TTCGGCGCTCTCACCGCCGC | CABE | 1597 |
| Glu-CTC-1-2 | | | |
| Homo_sapiens_tRNA- | TCGGCGCTCTCACCGCCGCG | CABE | 1598 |
| Glu-CTC-1-2 | | | |
| Homo_sapiens_tRNA- | CGGCGCTCTCACCGCCGCGG | CABE | 1599 |
| Glu-CTC-1-2 | | | |
| Homo_sapiens_tRNA- | GGCGCTCTCACCGCCGCGGC | CABE | 1600 |
| Glu-CTC-1-2 | | | |
| Homo_sapiens_tRNA- | GCGCTCTCACCGCCGCGGCC | CABE | 1601 |
| Glu-CTC-1-2 | | | |
| Homo_sapiens_tRNA- | CGCTCTCACCGCCGCGGCCC | CABE | 1602 |
| Glu-CTC-1-2 | | | |
| Homo_sapiens_tRNA- | GCTCTCACCGCCGCGGCCCG | CABE | 1603 |
| Glu-CTC-1-2 | | | |
| Homo_sapiens_tRNA- | CTCTCACCGCCGCGGCCCGG | CABE | 1604 |
| Glu-CTC-1-2 | | | |
| Homo_sapiens_tRNA- | GTGGTTAGGATTCGGCGCTC | CABE | 1605 |
| Glu-CTC-1-3 | | | |
| Homo_sapiens_tRNA- | TGGTTAGGATTCGGCGCTCT | CABE | 1606 |
| Glu-CTC-1-3 | | | |
| Homo_sapiens_tRNA- | GGTTAGGATTCGGCGCTCTC | CABE | 1607 |
| Glu-CTC-1-3 | | | |
| Homo_sapiens_tRNA- | GTTAGGATTCGGCGCTCTCA | CABE | 1608 |
| Glu-CTC-1-3 | | | |
| Homo_sapiens_tRNA- | TTAGGATTCGGCGCTCTCAC | CABE | 1609 |
| Glu-CTC-1-3 | | | |
| Homo_sapiens_tRNA- | TAGGATTCGGCGCTCTCACC | CABE | 1610 |
| Glu-CTC-1-3 | | | |
| Homo_sapiens_tRNA- | AGGATTCGGCGCTCTCACCG | CABE | 1611 |
| Glu-CTC-1-3 | | | |
| Homo_sapiens_tRNA- | GGATTCGGCGCTCTCACCGC | CABE | 1612 |
| Glu-CTC-1-3 | | | |
| Homo_sapiens_tRNA- | GATTCGGCGCTCTCACCGCC | CABE | 1613 |
| Glu-CTC-1-3 | | | |
| Homo_sapiens_tRNA- | ATTCGGCGCTCTCACCGCCG | CABE | 1614 |
| Glu-CTC-1-3 | | | |
| Homo_sapiens_tRNA- | TTCGGCGCTCTCACCGCCGC | CABE | 1615 |
| Glu-CTC-1-3 | | | |
| Homo_sapiens_tRNA- | TCGGCGCTCTCACCGCCGCG | CABE | 1616 |
| Glu-CTC-1-3 | | | |
| Homo_sapiens_tRNA- | CGGCGCTCTCACCGCCGCGG | CABE | 1617 |
| Glu-CTC-1-3 | | | |
| Homo_sapiens_tRNA- | GGCGCTCTCACCGCCGCGGC | CABE | 1618 |
| Glu-CTC-1-3 | | | |
| Homo_sapiens_tRNA- | GCGCTCTCACCGCCGCGGCC | CABE | 1619 |
| Glu-CTC-1-3 | | | |
| Homo_sapiens_tRNA- | CGCTCTCACCGCCGCGGCCC | CABE | 1620 |
| Glu-CTC-1-3 | | | |
| Homo_sapiens_tRNA- | GCTCTCACCGCCGCGGCCCG | CABE | 1621 |
| Glu-CTC-1-3 | | | |
| Homo_sapiens_tRNA- | CTCTCACCGCCGCGGCCCGG | CABE | 1622 |
| Glu-CTC-1-3 | | | |
| Homo_sapiens_tRNA- | GTGGTTAGGATTCGGCGCTC | CABE | 1623 |
| Glu-CTC-1-4 | | | |
| Homo_sapiens_tRNA- | TGGTTAGGATTCGGCGCTCT | CABE | 1624 |
| Glu-CTC-1-4 | | | |
| Homo_sapiens_tRNA- | GGTTAGGATTCGGCGCTCTC | CABE | 1625 |
| Glu-CTC-1-4 | | | |
| Homo_sapiens_tRNA- | GTTAGGATTCGGCGCTCTCA | CABE | 1626 |
| Glu-CTC-1-4 | | | |
| Homo_sapiens_tRNA- | TTAGGATTCGGCGCTCTCAC | CABE | 1627 |
| Glu-CTC-1-4 | | | |
| Homo_sapiens_tRNA- | TAGGATTCGGCGCTCTCACC | CABE | 1628 |
| Glu-CTC-1-4 | | | |
| Homo_sapiens_tRNA- | AGGATTCGGCGCTCTCACCG | CABE | 1629 |
| Glu-CTC-1-4 | | | |
| Homo_sapiens_tRNA- | GGATTCGGCGCTCTCACCGC | CABE | 1630 |
| Glu-CTC-1-4 | | | |
| Homo_sapiens_tRNA- | GATTCGGCGCTCTCACCGCC | CABE | 1631 |
| Glu-CTC-1-4 | | | |
| Homo_sapiens_tRNA- | ATTCGGCGCTCTCACCGCCG | CABE | 1632 |
| Glu-CTC-1-4 | | | |
| Homo_sapiens_tRNA- | TTCGGCGCTCTCACCGCCGC | CABE | 1633 |
| Glu-CTC-1-4 | | | |
| Homo_sapiens_tRNA- | TCGGCGCTCTCACCGCCGCG | CABE | 1634 |
| Glu-CTC-1-4 | | | |
| Homo_sapiens_tRNA- | CGGCGCTCTCACCGCCGCGG | CABE | 1635 |
| Glu-CTC-1-4 | | | |
| Homo_sapiens_tRNA- | GGCGCTCTCACCGCCGCGGC | CABE | 1636 |
| Glu-CTC-1-4 | | | |
| Homo_sapiens_tRNA- | GCGCTCTCACCGCCGCGGCC | CABE | 1637 |
| Glu-CTC-1-4 | | | |
| Homo_sapiens_tRNA- | CGCTCTCACCGCCGCGGCCC | CABE | 1638 |
| Glu-CTC-1-4 | | | |
| Homo_sapiens_tRNA- | GCTCTCACCGCCGCGGCCCG | CABE | 1639 |
| Glu-CTC-1-4 | | | |
| Homo_sapiens_tRNA- | CTCTCACCGCCGCGGCCCGG | CABE | 1640 |
| Glu-CTC-1-4 | | | |
| Homo_sapiens_tRNA- | GTGGTTAGGATTCGGCGCTC | CABE | 1641 |
| Glu-CTC-1-5 | | | |
| Homo_sapiens_tRNA- | TGGTTAGGATTCGGCGCTCT | CABE | 1642 |
| Glu-CTC-1-5 | | | |
| Homo_sapiens_tRNA- | GGTTAGGATTCGGCGCTCTC | CABE | 1643 |
| Glu-CTC-1-5 | | | |
| Homo_sapiens_tRNA- | GTTAGGATTCGGCGCTCTCA | CABE | 1644 |
| Glu-CTC-1-5 | | | |
| Homo_sapiens_tRNA- | TTAGGATTCGGCGCTCTCAC | CABE | 1645 |
| Glu-CTC-1-5 | | | |
| Homo_sapiens_tRNA- | TAGGATTCGGCGCTCTCACC | CABE | 1646 |
| Glu-CTC-1-5 | | | |
| Homo_sapiens_tRNA- | AGGATTCGGCGCTCTCACCG | CABE | 1647 |
| Glu-CTC-1-5 | | | |
| Homo_sapiens_tRNA- | GGATTCGGCGCTCTCACCGC | CABE | 1648 |
| Glu-CTC-1-5 | | | |
| Homo_sapiens_tRNA- | GATTCGGCGCTCTCACCGCC | CABE | 1649 |
| Glu-CTC-1-5 | | | |
| Homo_sapiens_tRNA- | ATTCGGCGCTCTCACCGCCG | CABE | 1650 |
| Glu-CTC-1-5 | | | |
| Homo_sapiens_tRNA- | TTCGGCGCTCTCACCGCCGC | CABE | 1651 |
| Glu-CTC-1-5 | | | |
| Homo_sapiens_tRNA- | TCGGCGCTCTCACCGCCGCG | CABE | 1652 |
| Glu-CTC-1-5 | | | |
| Homo_sapiens_tRNA- | CGGCGCTCTCACCGCCGCGG | CABE | 1653 |
| Glu-CTC-1-5 | | | |
| Homo_sapiens_tRNA- | GGCGCTCTCACCGCCGCGGC | CABE | 1654 |
| Glu-CTC-1-5 | | | |
| Homo_sapiens_tRNA- | GCGCTCTCACCGCCGCGGCC | CABE | 1655 |
| Glu-CTC-1-5 | | | |
| Homo_sapiens_tRNA- | CGCTCTCACCGCCGCGGCCC | CABE | 1656 |
| Glu-CTC-1-5 | | | |
| Homo_sapiens_tRNA- | GCTCTCACCGCCGCGGCCCG | CABE | 1657 |
| Glu-CTC-1-5 | | | |
| Homo_sapiens_tRNA- | CTCTCACCGCCGCGGCCCGG | CABE | 1658 |
| Glu-CTC-1-5 | | | |
| Homo_sapiens_tRNA- | GTGGTTAGGATTCGGCGCTC | CABE | 1659 |
| Glu-CTC-1-6 | | | |
| Homo_sapiens_tRNA- | TGGTTAGGATTCGGCGCTCT | CABE | 1660 |
| Glu-CTC-1-6 | | | |
| Homo_sapiens_tRNA- | GGTTAGGATTCGGCGCTCTC | CABE | 1661 |
| Glu-CTC-1-6 | | | |
| Homo_sapiens_tRNA- | GTTAGGATTCGGCGCTCTCA | CABE | 1662 |
| Glu-CTC-1-6 | | | |
| Homo_sapiens_tRNA- | TTAGGATTCGGCGCTCTCAC | CABE | 1663 |
| Glu-CTC-1-6 | | | |
| Homo_sapiens_tRNA- | TAGGATTCGGCGCTCTCACC | CABE | 1664 |
| Glu-CTC-1-6 | | | |
| Homo_sapiens_tRNA- | AGGATTCGGCGCTCTCACCG | CABE | 1665 |
| Glu-CTC-1-6 | | | |
| Homo_sapiens_tRNA- | GGATTCGGCGCTCTCACCGC | CABE | 1666 |
| Glu-CTC-1-6 | | | |
| Homo_sapiens_tRNA- | GATTCGGCGCTCTCACCGCC | CABE | 1667 |
| Glu-CTC-1-6 | | | |
| Homo_sapiens_tRNA- | ATTCGGCGCTCTCACCGCCG | CABE | 1668 |
| Glu-CTC-1-6 | | | |
| Homo_sapiens_tRNA- | TTCGGCGCTCTCACCGCCGC | CABE | 1669 |
| Glu-CTC-1-6 | | | |
| Homo_sapiens_tRNA- | TCGGCGCTCTCACCGCCGCG | CABE | 1670 |
| Glu-CTC-1-6 | | | |
| Homo_sapiens_tRNA- | CGGCGCTCTCACCGCCGCGG | CABE | 1671 |
| Glu-CTC-1-6 | | | |
| Homo_sapiens_tRNA- | GGCGCTCTCACCGCCGCGGC | CABE | 1672 |
| Glu-CTC-1-6 | | | |
| Homo_sapiens_tRNA- | GCGCTCTCACCGCCGCGGCC | CABE | 1673 |
| Glu-CTC-1-6 | | | |
| Homo_sapiens_tRNA- | CGCTCTCACCGCCGCGGCCC | CABE | 1674 |
| Glu-CTC-1-6 | | | |
| Homo_sapiens_tRNA- | GCTCTCACCGCCGCGGCCCG | CABE | 1675 |
| Glu-CTC-1-6 | | | |
| Homo_sapiens_tRNA- | CTCTCACCGCCGCGGCCCGG | CABE | 1676 |
| Glu-CTC-1-6 | | | |
| Homo_sapiens_tRNA- | GTGGTTAGGATTCGGCGCTC | CABE | 1677 |
| Glu-CTC-1-7 | | | |
| Homo_sapiens_tRNA- | TGGTTAGGATTCGGCGCTCT | CABE | 1678 |
| Glu-CTC-1-7 | | | |
| Homo_sapiens_tRNA- | GGTTAGGATTCGGCGCTCTC | CABE | 1679 |
| Glu-CTC-1-7 | | | |
| Homo_sapiens_tRNA- | GTTAGGATTCGGCGCTCTCA | CABE | 1680 |
| Glu-CTC-1-7 | | | |
| Homo_sapiens_tRNA- | TTAGGATTCGGCGCTCTCAC | CABE | 1681 |
| Glu-CTC-1-7 | | | |
| Homo_sapiens_tRNA- | TAGGATTCGGCGCTCTCACC | CABE | 1682 |
| Glu-CTC-1-7 | | | |
| Homo_sapiens_tRNA- | AGGATTCGGCGCTCTCACCG | CABE | 1683 |
| Glu-CTC-1-7 | | | |
| Homo_sapiens_tRNA- | GGATTCGGCGCTCTCACCGC | CABE | 1684 |
| Glu-CTC-1-7 | | | |
| Homo_sapiens_tRNA- | GATTCGGCGCTCTCACCGCC | CABE | 1685 |
| Glu-CTC-1-7 | | | |
| Homo_sapiens_tRNA- | ATTCGGCGCTCTCACCGCCG | CABE | 1686 |
| Glu-CTC-1-7 | | | |
| Homo_sapiens_tRNA- | TTCGGCGCTCTCACCGCCGC | CABE | 1687 |
| Glu-CTC-1-7 | | | |
| Homo_sapiens_tRNA- | TCGGCGCTCTCACCGCCGCG | CABE | 1688 |
| Glu-CTC-1-7 | | | |
| Homo_sapiens_tRNA- | CGGCGCTCTCACCGCCGCGG | CABE | 1689 |
| Glu-CTC-1-7 | | | |
| Homo_sapiens_tRNA- | GGCGCTCTCACCGCCGCGGC | CABE | 1690 |
| Glu-CTC-1-7 | | | |
| Homo_sapiens_tRNA- | GCGCTCTCACCGCCGCGGCC | CABE | 1691 |
| Glu-CTC-1-7 | | | |
| Homo_sapiens_tRNA- | CGCTCTCACCGCCGCGGCCC | CABE | 1692 |
| Glu-CTC-1-7 | | | |
| Homo_sapiens_tRNA- | GCTCTCACCGCCGCGGCCCG | CABE | 1693 |
| Glu-CTC-1-7 | | | |
| Homo_sapiens_tRNA- | CTCTCACCGCCGCGGCCCGG | CABE | 1694 |
| Glu-CTC-1-7 | | | |
| Homo_sapiens_tRNA- | GTGGTTAGGATTCGGCGCTC | CABE | 1695 |
| Glu-CTC-2-1 | | | |
| Homo_sapiens_tRNA- | TGGTTAGGATTCGGCGCTCT | CABE | 1696 |
| Glu-CTC-2-1 | | | |
| Homo_sapiens_tRNA- | GGTTAGGATTCGGCGCTCTC | CABE | 1697 |
| Glu-CTC-2-1 | | | |
| Homo_sapiens_tRNA- | GTTAGGATTCGGCGCTCTCA | CABE | 1698 |
| Glu-CTC-2-1 | | | |
| Homo_sapiens_tRNA- | TTAGGATTCGGCGCTCTCAC | CABE | 1699 |
| Glu-CTC-2-1 | | | |
| Homo_sapiens_tRNA- | TAGGATTCGGCGCTCTCACC | CABE | 1700 |
| Glu-CTC-2-1 | | | |
| Homo_sapiens_tRNA- | AGGATTCGGCGCTCTCACCG | CABE | 1701 |
| Glu-CTC-2-1 | | | |
| Homo_sapiens_tRNA- | GGATTCGGCGCTCTCACCGC | CABE | 1702 |
| Glu-CTC-2-1 | | | |
| Homo_sapiens_tRNA- | GATTCGGCGCTCTCACCGCC | CABE | 1703 |
| Glu-CTC-2-1 | | | |
| Homo_sapiens_tRNA- | ATTCGGCGCTCTCACCGCCG | CABE | 1704 |
| Glu-CTC-2-1 | | | |
| Homo_sapiens_tRNA- | TTCGGCGCTCTCACCGCCGC | CABE | 1705 |
| Glu-CTC-2-1 | | | |
| Homo_sapiens_tRNA- | TCGGCGCTCTCACCGCCGCG | CABE | 1706 |
| Glu-CTC-2-1 | | | |
| Homo_sapiens_tRNA- | CGGCGCTCTCACCGCCGCGG | CABE | 1707 |
| Glu-CTC-2-1 | | | |
| Homo_sapiens_tRNA- | GGCGCTCTCACCGCCGCGGC | CABE | 1708 |
| Glu-CTC-2-1 | | | |
| Homo_sapiens_tRNA- | GCGCTCTCACCGCCGCGGCC | CABE | 1709 |
| Glu-CTC-2-1 | | | |
| Homo_sapiens_tRNA- | CGCTCTCACCGCCGCGGCCC | CABE | 1710 |
| Glu-CTC-2-1 | | | |
| Homo_sapiens_tRNA- | GCTCTCACCGCCGCGGCCCG | CABE | 1711 |
| Glu-CTC-2-1 | | | |
| Homo_sapiens_tRNA- | CTCTCACCGCCGCGGCCCGG | CABE | 1712 |
| Glu-CTC-2-1 | | | |
| Homo_sapiens_tRNA- | GCGGTTAGGATTCCTGGTTT | CABE | 1713 |
| Glu-TTC-1-1 | | | |
| Homo_sapiens_tRNA- | CGGTTAGGATTCCTGGTTTT | CABE | 1714 |
| Glu-TTC-1-1 | | | |
| Homo_sapiens_tRNA- | GGTTAGGATTCCTGGTTTTC | CABE | 1715 |
| Glu-TTC-1-1 | | | |
| Homo_sapiens_tRNA- | GTTAGGATTCCTGGTTTTCA | CABE | 1716 |
| Glu-TTC-1-1 | | | |
| Homo_sapiens_tRNA- | TTAGGATTCCTGGTTTTCAC | CABE | 1717 |
| Glu-TTC-1-1 | | | |
| Homo_sapiens_tRNA- | TAGGATTCCTGGTTTTCACC | CABE | 1718 |
| Glu-TTC-1-1 | | | |
| Homo_sapiens_tRNA- | AGGATTCCTGGTTTTCACCC | CABE | 1719 |
| Glu-TTC-1-1 | | | |
| Homo_sapiens_tRNA- | GGATTCCTGGTTTTCACCCA | CABE | 1720 |
| Glu-TTC-1-1 | | | |
| Homo_sapiens_tRNA- | GATTCCTGGTTTTCACCCAG | CABE | 1721 |
| Glu-TTC-1-1 | | | |
| Homo_sapiens_tRNA- | ATTCCTGGTTTTCACCCAGG | CABE | 1722 |
| Glu-TTC-1-1 | | | |
| Homo_sapiens_tRNA- | TTCCTGGTTTTCACCCAGGT | CABE | 1723 |
| Glu-TTC-1-1 | | | |
| Homo_sapiens_tRNA- | TCCTGGTTTTCACCCAGGTG | CABE | 1724 |
| Glu-TTC-1-1 | | | |
| Homo_sapiens_tRNA- | CCTGGTTTTCACCCAGGTGG | CABE | 1725 |
| Glu-TTC-1-1 | | | |
| Homo_sapiens_tRNA- | CTGGTTTTCACCCAGGTGGC | CABE | 1726 |
| Glu-TTC-1-1 | | | |
| Homo_sapiens_tRNA- | TGGTTTTCACCCAGGTGGCC | CABE | 1727 |
| Glu-TTC-1-1 | | | |
| Homo_sapiens_tRNA- | GGTTTTCACCCAGGTGGCCC | CABE | 1728 |
| Glu-TTC-1-1 | | | |
| Homo_sapiens_tRNA- | GTTTTCACCCAGGTGGCCCG | CABE | 1729 |
| Glu-TTC-1-1 | | | |
| Homo_sapiens_tRNA- | TTTTCACCCAGGTGGCCCGG | CABE | 1730 |
| Glu-TTC-1-1 | | | |
| Homo_sapiens_tRNA- | GCGGTTAGGATTCCTGGTTT | CABE | 1731 |
| Glu-TTC-1-2 | | | |
| Homo_sapiens_tRNA- | CGGTTAGGATTCCTGGTTTT | CABE | 1732 |
| Glu-TTC-1-2 | | | |
| Homo_sapiens_tRNA- | GGTTAGGATTCCTGGTTTTC | CABE | 1733 |
| Glu-TTC-1-2 | | | |
| Homo_sapiens_tRNA- | GTTAGGATTCCTGGTTTTCA | CABE | 1734 |
| Glu-TTC-1-2 | | | |
| Homo_sapiens_tRNA- | TTAGGATTCCTGGTTTTCAC | CABE | 1735 |
| Glu-TTC-1-2 | | | |
| Homo_sapiens_tRNA- | TAGGATTCCTGGTTTTCACC | CABE | 1736 |
| Glu-TTC-1-2 | | | |
| Homo_sapiens_tRNA- | AGGATTCCTGGTTTTCACCC | CABE | 1737 |
| Glu-TTC-1-2 | | | |
| Homo_sapiens_tRNA- | GGATTCCTGGTTTTCACCCA | CABE | 1738 |
| Glu-TTC-1-2 | | | |
| Homo_sapiens_tRNA- | GATTCCTGGTTTTCACCCAG | CABE | 1739 |
| Glu-TTC-1-2 | | | |
| Homo_sapiens_tRNA- | ATTCCTGGTTTTCACCCAGG | CABE | 1740 |
| Glu-TTC-1-2 | | | |
| Homo_sapiens_tRNA- | TTCCTGGTTTTCACCCAGGT | CABE | 1741 |
| Glu-TTC-1-2 | | | |
| Homo_sapiens_tRNA- | TCCTGGTTTTCACCCAGGTG | CABE | 1742 |
| Glu-TTC-1-2 | | | |
| Homo_sapiens_tRNA- | CCTGGTTTTCACCCAGGTGG | CABE | 1743 |
| Glu-TTC-1-2 | | | |
| Homo_sapiens_tRNA- | CTGGTTTTCACCCAGGTGGC | CABE | 1744 |
| Glu-TTC-1-2 | | | |
| Homo_sapiens_tRNA- | TGGTTTTCACCCAGGTGGCC | CABE | 1745 |
| Glu-TTC-1-2 | | | |
| Homo_sapiens_tRNA- | GGTTTTCACCCAGGTGGCCC | CABE | 1746 |
| Glu-TTC-1-2 | | | |
| Homo_sapiens_tRNA- | GTTTTCACCCAGGTGGCCCG | CABE | 1747 |
| Glu-TTC-1-2 | | | |
| Homo_sapiens_tRNA- | TTTTCACCCAGGTGGCCCGG | CABE | 1748 |
| Glu-TTC-1-2 | | | |
| Homo_sapiens_tRNA- | GCGGTTAGGATTCCTGGTTT | CABE | 1749 |
| Glu-TTC-2-1 | | | |
| Homo_sapiens_tRNA- | CGGTTAGGATTCCTGGTTTT | CABE | 1750 |
| Glu-TTC-2-1 | | | |
| Homo_sapiens_tRNA- | GGTTAGGATTCCTGGTTTTC | CABE | 1751 |
| Glu-TTC-2-1 | | | |
| Homo_sapiens_tRNA- | GTTAGGATTCCTGGTTTTCA | CABE | 1752 |
| Glu-TTC-2-1 | | | |
| Homo_sapiens_tRNA- | TTAGGATTCCTGGTTTTCAC | CABE | 1753 |
| Glu-TTC-2-1 | | | |
| Homo_sapiens_tRNA- | TAGGATTCCTGGTTTTCACC | CABE | 1754 |
| Glu-TTC-2-1 | | | |
| Homo_sapiens_tRNA- | AGGATTCCTGGTTTTCACCC | CABE | 1755 |
| Glu-TTC-2-1 | | | |
| Homo_sapiens_tRNA- | GGATTCCTGGTTTTCACCCA | CABE | 1756 |
| Glu-TTC-2-1 | | | |
| Homo_sapiens_tRNA- | GATTCCTGGTTTTCACCCAG | CABE | 1757 |
| Glu-TTC-2-1 | | | |
| Homo_sapiens_tRNA- | ATTCCTGGTTTTCACCCAGG | CABE | 1758 |
| Glu-TTC-2-1 | | | |
| Homo_sapiens_tRNA- | TTCCTGGTTTTCACCCAGGC | CABE | 1759 |
| Glu-TTC-2-1 | | | |
| Homo_sapiens_tRNA- | TCCTGGTTTTCACCCAGGCG | CABE | 1760 |
| Glu-TTC-2-1 | | | |
| Homo_sapiens_tRNA- | CCTGGTTTTCACCCAGGCGG | CABE | 1761 |
| Glu-TTC-2-1 | | | |
| Homo_sapiens_tRNA- | CTGGTTTTCACCCAGGCGGC | CABE | 1762 |
| Glu-TTC-2-1 | | | |
| Homo_sapiens_tRNA- | TGGTTTTCACCCAGGCGGCC | CABE | 1763 |
| Glu-TTC-2-1 | | | |
| Homo_sapiens_tRNA- | GGTTTTCACCCAGGCGGCCC | CABE | 1764 |
| Glu-TTC-2-1 | | | |
| Homo_sapiens_tRNA- | GTTTTCACCCAGGCGGCCCG | CABE | 1765 |
| Glu-TTC-2-1 | | | |
| Homo_sapiens_tRNA- | TTTTCACCCAGGCGGCCCGG | CABE | 1766 |
| Glu-TTC-2-1 | | | |
| Homo_sapiens_tRNA- | GCGGTTAGGATTCCTGGTTT | CABE | 1767 |
| Glu-TTC-2-2 | | | |
| Homo_sapiens_tRNA- | CGGTTAGGATTCCTGGTTTT | CABE | 1768 |
| Glu-TTC-2-2 | | | |
| Homo_sapiens_tRNA- | GGTTAGGATTCCTGGTTTTC | CABE | 1769 |
| Glu-TTC-2-2 | | | |
| Homo_sapiens_tRNA- | GTTAGGATTCCTGGTTTTCA | CABE | 1770 |
| Glu-TTC-2-2 | | | |
| Homo_sapiens_tRNA- | TTAGGATTCCTGGTTTTCAC | CABE | 1771 |
| Glu-TTC-2-2 | | | |
| Homo_sapiens_tRNA- | TAGGATTCCTGGTTTTCACC | CABE | 1772 |
| Glu-TTC-2-2 | | | |
| Homo_sapiens_tRNA- | AGGATTCCTGGTTTTCACCC | CABE | 1773 |
| Glu-TTC-2-2 | | | |
| Homo_sapiens_tRNA- | GGATTCCTGGTTTTCACCCA | CABE | 1774 |
| Glu-TTC-2-2 | | | |
| Homo_sapiens_tRNA- | GATTCCTGGTTTTCACCCAG | CABE | 1775 |
| Glu-TTC-2-2 | | | |
| Homo_sapiens_tRNA- | ATTCCTGGTTTTCACCCAGG | CABE | 1776 |
| Glu-TTC-2-2 | | | |
| Homo_sapiens_tRNA- | TTCCTGGTTTTCACCCAGGC | CABE | 1777 |
| Glu-TTC-2-2 | | | |
| Homo_sapiens_tRNA- | TCCTGGTTTTCACCCAGGCG | CABE | 1778 |
| Glu-TTC-2-2 | | | |
| Homo_sapiens_tRNA- | CCTGGTTTTCACCCAGGCGG | CABE | 1779 |
| Glu-TTC-2-2 | | | |
| Homo_sapiens_tRNA- | CTGGTTTTCACCCAGGCGGC | CABE | 1780 |
| Glu-TTC-2-2 | | | |
| Homo_sapiens_tRNA- | TGGTTTTCACCCAGGCGGCC | CABE | 1781 |
| Glu-TTC-2-2 | | | |
| Homo_sapiens_tRNA- | GGTTTTCACCCAGGCGGCCC | CABE | 1782 |
| Glu-TTC-2-2 | | | |
| Homo_sapiens_tRNA- | GTTTTCACCCAGGCGGCCCG | CABE | 1783 |
| Glu-TTC-2-2 | | | |
| Homo_sapiens_tRNA- | TTTTCACCCAGGCGGCCCGG | CABE | 1784 |
| Glu-TTC-2-2 | | | |
| Homo_sapiens_tRNA- | GTGGCTAGGATTCGGCGCTT | CABE | 1785 |
| Glu-TTC-3-1 | | | |
| Homo_sapiens_tRNA- | TGGCTAGGATTCGGCGCTTT | CABE | 1786 |
| Glu-TTC-3-1 | | | |
| Homo_sapiens_tRNA- | GGCTAGGATTCGGCGCTTTC | CABE | 1787 |
| Glu-TTC-3-1 | | | |
| Homo_sapiens_tRNA- | GCTAGGATTCGGCGCTTTCA | CABE | 1788 |
| Glu-TTC-3-1 | | | |
| Homo_sapiens_tRNA- | CTAGGATTCGGCGCTTTCAC | CABE | 1789 |
| Glu-TTC-3-1 | | | |
| Homo_sapiens_tRNA- | TAGGATTCGGCGCTTTCACC | CABE | 1790 |
| Glu-TTC-3-1 | | | |
| Homo_sapiens_tRNA- | AGGATTCGGCGCTTTCACCG | CABE | 1791 |
| Glu-TTC-3-1 | | | |
| Homo_sapiens_tRNA- | GGATTCGGCGCTTTCACCGC | CABE | 1792 |
| Glu-TTC-3-1 | | | |
| Homo_sapiens_tRNA- | GATTCGGCGCTTTCACCGCC | CABE | 1793 |
| Glu-TTC-3-1 | | | |
| Homo_sapiens_tRNA- | ATTCGGCGCTTTCACCGCCG | CABE | 1794 |
| Glu-TTC-3-1 | | | |
| Homo_sapiens_tRNA- | TTCGGCGCTTTCACCGCCGC | CABE | 1795 |
| Glu-TTC-3-1 | | | |
| Homo_sapiens_tRNA- | TCGGCGCTTTCACCGCCGCG | CABE | 1796 |
| Glu-TTC-3-1 | | | |
| Homo_sapiens_tRNA- | CGGCGCTTTCACCGCCGCGG | CABE | 1797 |
| Glu-TTC-3-1 | | | |
| Homo_sapiens_tRNA- | GGCGCTTTCACCGCCGCGGC | CABE | 1798 |
| Glu-TTC-3-1 | | | |
| Homo_sapiens_tRNA- | GCGCTTTCACCGCCGCGGCC | CABE | 1799 |
| Glu-TTC-3-1 | | | |
| Homo_sapiens_tRNA- | CGCTTTCACCGCCGCGGCCC | CABE | 1800 |
| Glu-TTC-3-1 | | | |
| Homo_sapiens_tRNA- | GCTTTCACCGCCGCGGCCCG | CABE | 1801 |
| Glu-TTC-3-1 | | | |
| Homo_sapiens_tRNA- | CTTTCACCGCCGCGGCCCGG | CABE | 1802 |
| Glu-TTC-3-1 | | | |
| Homo_sapiens_tRNA- | GTGGCTAGGATTCGGCGCTT | CABE | 1803 |
| Glu-TTC-4-1 | | | |
| Homo_sapiens_tRNA- | TGGCTAGGATTCGGCGCTTT | CABE | 1804 |
| Glu-TTC-4-1 | | | |
| Homo_sapiens_tRNA- | GGCTAGGATTCGGCGCTTTC | CABE | 1805 |
| Glu-TTC-4-1 | | | |
| Homo_sapiens_tRNA- | GCTAGGATTCGGCGCTTTCA | CABE | 1806 |
| Glu-TTC-4-1 | | | |
| Homo_sapiens_tRNA- | CTAGGATTCGGCGCTTTCAC | CABE | 1807 |
| Glu-TTC-4-1 | | | |
| Homo_sapiens_tRNA- | TAGGATTCGGCGCTTTCACC | CABE | 1808 |
| Glu-TTC-4-1 | | | |
| Homo_sapiens_tRNA- | AGGATTCGGCGCTTTCACCG | CABE | 1809 |
| Glu-TTC-4-1 | | | |
| Homo_sapiens_tRNA- | GGATTCGGCGCTTTCACCGC | CABE | 1810 |
| Glu-TTC-4-1 | | | |
| Homo_sapiens_tRNA- | GATTCGGCGCTTTCACCGCC | CABE | 1811 |
| Glu-TTC-4-1 | | | |
| Homo_sapiens_tRNA- | ATTCGGCGCTTTCACCGCCG | CABE | 1812 |
| Glu-TTC-4-1 | | | |
| Homo_sapiens_tRNA- | TTCGGCGCTTTCACCGCCGC | CABE | 1813 |
| Glu-TTC-4-1 | | | |
| Homo_sapiens_tRNA- | TCGGCGCTTTCACCGCCGCG | CABE | 1814 |
| Glu-TTC-4-1 | | | |
| Homo_sapiens_tRNA- | CGGCGCTTTCACCGCCGCGG | CABE | 1815 |
| Glu-TTC-4-1 | | | |
| Homo_sapiens_tRNA- | GGCGCTTTCACCGCCGCGGC | CABE | 1816 |
| Glu-TTC-4-1 | | | |
| Homo_sapiens_tRNA- | GCGCTTTCACCGCCGCGGCC | CABE | 1817 |
| Glu-TTC-4-1 | | | |
| Homo_sapiens_tRNA- | CGCTTTCACCGCCGCGGCCC | CABE | 1818 |
| Glu-TTC-4-1 | | | |
| Homo_sapiens_tRNA- | GCTTTCACCGCCGCGGCCCG | CABE | 1819 |
| Glu-TTC-4-1 | | | |
| Homo_sapiens_tRNA- | CTTTCACCGCCGCGGCCCGG | CABE | 1820 |
| Glu-TTC-4-1 | | | |
| Homo_sapiens_tRNA- | GTGGCTAGGATTCGGCGCTT | CABE | 1821 |
| Glu-TTC-4-2 | | | |
| Homo_sapiens_tRNA- | TGGCTAGGATTCGGCGCTTT | CABE | 1822 |
| Glu-TTC-4-2 | | | |
| Homo_sapiens_tRNA- | GGCTAGGATTCGGCGCTTTC | CABE | 1823 |
| Glu-TTC-4-2 | | | |
| Homo_sapiens_tRNA- | GCTAGGATTCGGCGCTTTCA | CABE | 1824 |
| Glu-TTC-4-2 | | | |
| Homo_sapiens_tRNA- | CTAGGATTCGGCGCTTTCAC | CABE | 1825 |
| Glu-TTC-4-2 | | | |
| Homo_sapiens_tRNA- | TAGGATTCGGCGCTTTCACC | CABE | 1826 |
| Glu-TTC-4-2 | | | |
| Homo_sapiens_tRNA- | AGGATTCGGCGCTTTCACCG | CABE | 1827 |
| Glu-TTC-4-2 | | | |
| Homo_sapiens_tRNA- | GGATTCGGCGCTTTCACCGC | CABE | 1828 |
| Glu-TTC-4-2 | | | |
| Homo_sapiens_tRNA- | GATTCGGCGCTTTCACCGCC | CABE | 1829 |
| Glu-TTC-4-2 | | | |
| Homo_sapiens_tRNA- | ATTCGGCGCTTTCACCGCCG | CABE | 1830 |
| Glu-TTC-4-2 | | | |
| Homo_sapiens_tRNA- | TTCGGCGCTTTCACCGCCGC | CABE | 1831 |
| Glu-TTC-4-2 | | | |
| Homo_sapiens_tRNA- | TCGGCGCTTTCACCGCCGCG | CABE | 1832 |
| Glu-TTC-4-2 | | | |
| Homo_sapiens_tRNA- | CGGCGCTTTCACCGCCGCGG | CABE | 1833 |
| Glu-TTC-4-2 | | | |
| Homo_sapiens_tRNA- | GGCGCTTTCACCGCCGCGGC | CABE | 1834 |
| Glu-TTC-4-2 | | | |
| Homo_sapiens_tRNA- | GCGCTTTCACCGCCGCGGCC | CABE | 1835 |
| Glu-TTC-4-2 | | | |
| Homo_sapiens_tRNA- | CGCTTTCACCGCCGCGGCCC | CABE | 1836 |
| Glu-TTC-4-2 | | | |
| Homo_sapiens_tRNA- | GCTTTCACCGCCGCGGCCCG | CABE | 1837 |
| Glu-TTC-4-2 | | | |
| Homo_sapiens_tRNA- | CTTTCACCGCCGCGGCCCGG | CABE | 1838 |
| Glu-TTC-4-2 | | | |
| Homo_sapiens_tRNA- | GTGGTTAGCATAGCTGCCTT | CABE | 1839 |
| Gly-TCC-1-1 | | | |
| Homo_sapiens_tRNA- | TGGTTAGCATAGCTGCCTTC | CABE | 1840 |
| Gly-TCC-1-1 | | | |
| Homo_sapiens_tRNA- | GGTTAGCATAGCTGCCTTCC | CABE | 1841 |
| Gly-TCC-1-1 | | | |
| Homo_sapiens_tRNA- | GTTAGCATAGCTGCCTTCCA | CABE | 1842 |
| Gly-TCC-1-1 | | | |
| Homo_sapiens_tRNA- | TTAGCATAGCTGCCTTCCAA | CABE | 1843 |
| Gly-TCC-1-1 | | | |
| Homo_sapiens_tRNA- | TAGCATAGCTGCCTTCCAAG | CABE | 1844 |
| Gly-TCC-1-1 | | | |
| Homo_sapiens_tRNA- | AGCATAGCTGCCTTCCAAGC | CABE | 1845 |
| Gly-TCC-1-1 | | | |
| Homo_sapiens_tRNA- | GCATAGCTGCCTTCCAAGCA | CABE | 1846 |
| Gly-TCC-1-1 | | | |
| Homo_sapiens_tRNA- | CATAGCTGCCTTCCAAGCAG | CABE | 1847 |
| Gly-TCC-1-1 | | | |
| Homo_sapiens_tRNA- | ATAGCTGCCTTCCAAGCAGT | CABE | 1848 |
| Gly-TCC-1-1 | | | |
| Homo_sapiens_tRNA- | TAGCTGCCTTCCAAGCAGTT | CABE | 1849 |
| Gly-TCC-1-1 | | | |
| Homo_sapiens_tRNA- | AGCTGCCTTCCAAGCAGTTG | CABE | 1850 |
| Gly-TCC-1-1 | | | |
| Homo_sapiens_tRNA- | GCTGCCTTCCAAGCAGTTGA | CABE | 1851 |
| Gly-TCC-1-1 | | | |
| Homo_sapiens_tRNA- | CTGCCTTCCAAGCAGTTGAC | CABE | 1852 |
| Gly-TCC-1-1 | | | |
| Homo_sapiens_tRNA- | TGCCTTCCAAGCAGTTGACC | CABE | 1853 |
| Gly-TCC-1-1 | | | |
| Homo_sapiens_tRNA- | GCCTTCCAAGCAGTTGACCC | CABE | 1854 |
| Gly-TCC-1-1 | | | |
| Homo_sapiens_tRNA- | CCTTCCAAGCAGTTGACCCG | CABE | 1855 |
| Gly-TCC-1-1 | | | |
| Homo_sapiens_tRNA- | CTTCCAAGCAGTTGACCCGG | CABE | 1856 |
| Gly-TCC-1-1 | | | |
| Homo_sapiens_tRNA- | GTGGTGAGCATAGCTGCCTT | CABE | 1857 |
| Gly-TCC-2-1 | | | |
| Homo_sapiens_tRNA- | TGGTGAGCATAGCTGCCTTC | CABE | 1858 |
| Gly-TCC-2-1 | | | |
| Homo_sapiens_tRNA- | GGTGAGCATAGCTGCCTTCC | CABE | 1859 |
| Gly-TCC-2-1 | | | |
| Homo_sapiens_tRNA- | GTGAGCATAGCTGCCTTCCA | CABE | 1860 |
| Gly-TCC-2-1 | | | |
| Homo_sapiens_tRNA- | TGAGCATAGCTGCCTTCCAA | CABE | 1861 |
| Gly-TCC-2-1 | | | |
| Homo_sapiens_tRNA- | GAGCATAGCTGCCTTCCAAG | CABE | 1862 |
| Gly-TCC-2-1 | | | |
| Homo_sapiens_tRNA- | AGCATAGCTGCCTTCCAAGC | CABE | 1863 |
| Gly-TCC-2-1 | | | |
| Homo_sapiens_tRNA- | GCATAGCTGCCTTCCAAGCA | CABE | 1864 |
| Gly-TCC-2-1 | | | |
| Homo_sapiens_tRNA- | CATAGCTGCCTTCCAAGCAG | CABE | 1865 |
| Gly-TCC-2-1 | | | |
| Homo_sapiens_tRNA- | ATAGCTGCCTTCCAAGCAGT | CABE | 1866 |
| Gly-TCC-2-1 | | | |
| Homo_sapiens_tRNA- | TAGCTGCCTTCCAAGCAGTT | CABE | 1867 |
| Gly-TCC-2-1 | | | |
| Homo_sapiens_tRNA- | AGCTGCCTTCCAAGCAGTTG | CABE | 1868 |
| Gly-TCC-2-1 | | | |
| Homo_sapiens_tRNA- | GCTGCCTTCCAAGCAGTTGA | CABE | 1869 |
| Gly-TCC-2-1 | | | |
| Homo_sapiens_tRNA- | CTGCCTTCCAAGCAGTTGAC | CABE | 1870 |
| Gly-TCC-2-1 | | | |
| Homo_sapiens_tRNA- | TGCCTTCCAAGCAGTTGACC | CABE | 1871 |
| Gly-TCC-2-1 | | | |
| Homo_sapiens_tRNA- | GCCTTCCAAGCAGTTGACCC | CABE | 1872 |
| Gly-TCC-2-1 | | | |
| Homo_sapiens_tRNA- | CCTTCCAAGCAGTTGACCCG | CABE | 1873 |
| Gly-TCC-2-1 | | | |
| Homo_sapiens_tRNA- | CTTCCAAGCAGTTGACCCGG | CABE | 1874 |
| Gly-TCC-2-1 | | | |
| Homo_sapiens_tRNA- | GTGGTGAGCATAGCTGCCTT | CABE | 1875 |
| Gly-TCC-2-2 | | | |
| Homo_sapiens_tRNA- | TGGTGAGCATAGCTGCCTTC | CABE | 1876 |
| Gly-TCC-2-2 | | | |
| Homo_sapiens_tRNA- | GGTGAGCATAGCTGCCTTCC | CABE | 1877 |
| Gly-TCC-2-2 | | | |
| Homo_sapiens_tRNA- | GTGAGCATAGCTGCCTTCCA | CABE | 1878 |
| Gly-TCC-2-2 | | | |
| Homo_sapiens_tRNA- | TGAGCATAGCTGCCTTCCAA | CABE | 1879 |
| Gly-TCC-2-2 | | | |
| Homo_sapiens_tRNA- | GAGCATAGCTGCCTTCCAAG | CABE | 1880 |
| Gly-TCC-2-2 | | | |
| Homo_sapiens_tRNA- | AGCATAGCTGCCTTCCAAGC | CABE | 1881 |
| Gly-TCC-2-2 | | | |
| Homo_sapiens_tRNA- | GCATAGCTGCCTTCCAAGCA | CABE | 1882 |
| Gly-TCC-2-2 | | | |
| Homo_sapiens_tRNA- | CATAGCTGCCTTCCAAGCAG | CABE | 1883 |
| Gly-TCC-2-2 | | | |
| Homo_sapiens_tRNA- | ATAGCTGCCTTCCAAGCAGT | CABE | 1884 |
| Gly-TCC-2-2 | | | |
| Homo_sapiens_tRNA- | TAGCTGCCTTCCAAGCAGTT | CABE | 1885 |
| Gly-TCC-2-2 | | | |
| Homo_sapiens_tRNA- | AGCTGCCTTCCAAGCAGTTG | CABE | 1886 |
| Gly-TCC-2-2 | | | |
| Homo_sapiens_tRNA- | GCTGCCTTCCAAGCAGTTGA | CABE | 1887 |
| Gly-TCC-2-2 | | | |
| Homo_sapiens_tRNA- | CTGCCTTCCAAGCAGTTGAC | CABE | 1888 |
| Gly-TCC-2-2 | | | |
| Homo_sapiens_tRNA- | TGCCTTCCAAGCAGTTGACC | CABE | 1889 |
| Gly-TCC-2-2 | | | |
| Homo_sapiens_tRNA- | GCCTTCCAAGCAGTTGACCC | CABE | 1890 |
| Gly-TCC-2-2 | | | |
| Homo_sapiens_tRNA- | CCTTCCAAGCAGTTGACCCG | CABE | 1891 |
| Gly-TCC-2-2 | | | |
| Homo_sapiens_tRNA- | CTTCCAAGCAGTTGACCCGG | CABE | 1892 |
| Gly-TCC-2-2 | | | |
| Homo_sapiens_tRNA- | GTGGTGAGCATAGCTGCCTT | CABE | 1893 |
| Gly-TCC-2-3 | | | |
| Homo_sapiens_tRNA- | TGGTGAGCATAGCTGCCTTC | CABE | 1894 |
| Gly-TCC-2-3 | | | |
| Homo_sapiens_tRNA- | GGTGAGCATAGCTGCCTTCC | CABE | 1895 |
| Gly-TCC-2-3 | | | |
| Homo_sapiens_tRNA- | GTGAGCATAGCTGCCTTCCA | CABE | 1896 |
| Gly-TCC-2-3 | | | |
| Homo_sapiens_tRNA- | TGAGCATAGCTGCCTTCCAA | CABE | 1897 |
| Gly-TCC-2-3 | | | |
| Homo_sapiens_tRNA- | GAGCATAGCTGCCTTCCAAG | CABE | 1898 |
| Gly-TCC-2-3 | | | |
| Homo_sapiens_tRNA- | AGCATAGCTGCCTTCCAAGC | CABE | 1899 |
| Gly-TCC-2-3 | | | |
| Homo_sapiens_tRNA- | GCATAGCTGCCTTCCAAGCA | CABE | 1900 |
| Gly-TCC-2-3 | | | |
| Homo_sapiens_tRNA- | CATAGCTGCCTTCCAAGCAG | CABE | 1901 |
| Gly-TCC-2-3 | | | |
| Homo_sapiens_tRNA- | ATAGCTGCCTTCCAAGCAGT | CABE | 1902 |
| Gly-TCC-2-3 | | | |
| Homo_sapiens_tRNA- | TAGCTGCCTTCCAAGCAGTT | CABE | 1903 |
| Gly-TCC-2-3 | | | |
| Homo_sapiens_tRNA- | AGCTGCCTTCCAAGCAGTTG | CABE | 1904 |
| Gly-TCC-2-3 | | | |
| Homo_sapiens_tRNA- | GCTGCCTTCCAAGCAGTTGA | CABE | 1905 |
| Gly-TCC-2-3 | | | |
| Homo_sapiens_tRNA- | CTGCCTTCCAAGCAGTTGAC | CABE | 1906 |
| Gly-TCC-2-3 | | | |
| Homo_sapiens_tRNA- | TGCCTTCCAAGCAGTTGACC | CABE | 1907 |
| Gly-TCC-2-3 | | | |
| Homo_sapiens_tRNA- | GCCTTCCAAGCAGTTGACCC | CABE | 1908 |
| Gly-TCC-2-3 | | | |
| Homo_sapiens_tRNA- | CCTTCCAAGCAGTTGACCCG | CABE | 1909 |
| Gly-TCC-2-3 | | | |
| Homo_sapiens_tRNA- | CTTCCAAGCAGTTGACCCGG | CABE | 1910 |
| Gly-TCC-2-3 | | | |
| Homo_sapiens_tRNA- | GTGGTGAGCATAGCTGCCTT | CABE | 1911 |
| Gly-TCC-2-4 | | | |
| Homo_sapiens_tRNA- | TGGTGAGCATAGCTGCCTTC | CABE | 1912 |
| Gly-TCC-2-4 | | | |
| Homo_sapiens_tRNA- | GGTGAGCATAGCTGCCTTCC | CABE | 1913 |
| Gly-TCC-2-4 | | | |
| Homo_sapiens_tRNA- | GTGAGCATAGCTGCCTTCCA | CABE | 1914 |
| Gly-TCC-2-4 | | | |
| Homo_sapiens_tRNA- | TGAGCATAGCTGCCTTCCAA | CABE | 1915 |
| Gly-TCC-2-4 | | | |
| Homo_sapiens_tRNA- | GAGCATAGCTGCCTTCCAAG | CABE | 1916 |
| Gly-TCC-2-4 | | | |
| Homo_sapiens_tRNA- | AGCATAGCTGCCTTCCAAGC | CABE | 1917 |
| Gly-TCC-2-4 | | | |
| Homo_sapiens_tRNA- | GCATAGCTGCCTTCCAAGCA | CABE | 1918 |
| Gly-TCC-2-4 | | | |
| Homo_sapiens_tRNA- | CATAGCTGCCTTCCAAGCAG | CABE | 1919 |
| Gly-TCC-2-4 | | | |
| Homo_sapiens_tRNA- | ATAGCTGCCTTCCAAGCAGT | CABE | 1920 |
| Gly-TCC-2-4 | | | |
| Homo_sapiens_tRNA- | TAGCTGCCTTCCAAGCAGTT | CABE | 1921 |
| Gly-TCC-2-4 | | | |
| Homo_sapiens_tRNA- | AGCTGCCTTCCAAGCAGTTG | CABE | 1922 |
| Gly-TCC-2-4 | | | |
| Homo_sapiens_tRNA- | GCTGCCTTCCAAGCAGTTGA | CABE | 1923 |
| Gly-TCC-2-4 | | | |
| Homo_sapiens_tRNA- | CTGCCTTCCAAGCAGTTGAC | CABE | 1924 |
| Gly-TCC-2-4 | | | |
| Homo_sapiens_tRNA- | TGCCTTCCAAGCAGTTGACC | CABE | 1925 |
| Gly-TCC-2-4 | | | |
| Homo_sapiens_tRNA- | GCCTTCCAAGCAGTTGACCC | CABE | 1926 |
| Gly-TCC-2-4 | | | |
| Homo_sapiens_tRNA- | CCTTCCAAGCAGTTGACCCG | CABE | 1927 |
| Gly-TCC-2-4 | | | |
| Homo_sapiens_tRNA- | CTTCCAAGCAGTTGACCCGG | CABE | 1928 |
| Gly-TCC-2-4 | | | |
| Homo_sapiens_tRNA- | GTGGTGAGCATAGCTGCCTT | CABE | 1929 |
| Gly-TCC-2-5 | | | |
| Homo_sapiens_tRNA- | TGGTGAGCATAGCTGCCTTC | CABE | 1930 |
| Gly-TCC-2-5 | | | |
| Homo_sapiens_tRNA- | GGTGAGCATAGCTGCCTTCC | CABE | 1931 |
| Gly-TCC-2-5 | | | |
| Homo_sapiens_tRNA- | GTGAGCATAGCTGCCTTCCA | CABE | 1932 |
| Gly-TCC-2-5 | | | |
| Homo_sapiens_tRNA- | TGAGCATAGCTGCCTTCCAA | CABE | 1933 |
| Gly-TCC-2-5 | | | |
| Homo_sapiens_tRNA- | GAGCATAGCTGCCTTCCAAG | CABE | 1934 |
| Gly-TCC-2-5 | | | |
| Homo_sapiens_tRNA- | AGCATAGCTGCCTTCCAAGC | CABE | 1935 |
| Gly-TCC-2-5 | | | |
| Homo_sapiens_tRNA- | GCATAGCTGCCTTCCAAGCA | CABE | 1936 |
| Gly-TCC-2-5 | | | |
| Homo_sapiens_tRNA- | CATAGCTGCCTTCCAAGCAG | CABE | 1937 |
| Gly-TCC-2-5 | | | |
| Homo_sapiens_tRNA- | ATAGCTGCCTTCCAAGCAGT | CABE | 1938 |
| Gly-TCC-2-5 | | | |
| Homo_sapiens_tRNA- | TAGCTGCCTTCCAAGCAGTT | CABE | 1939 |
| Gly-TCC-2-5 | | | |
| Homo_sapiens_tRNA- | AGCTGCCTTCCAAGCAGTTG | CABE | 1940 |
| Gly-TCC-2-5 | | | |
| Homo_sapiens_tRNA- | GCTGCCTTCCAAGCAGTTGA | CABE | 1941 |
| Gly-TCC-2-5 | | | |
| Homo_sapiens_tRNA- | CTGCCTTCCAAGCAGTTGAC | CABE | 1942 |
| Gly-TCC-2-5 | | | |
| Homo_sapiens_tRNA- | TGCCTTCCAAGCAGTTGACC | CABE | 1943 |
| Gly-TCC-2-5 | | | |
| Homo_sapiens_tRNA- | GCCTTCCAAGCAGTTGACCC | CABE | 1944 |
| Gly-TCC-2-5 | | | |
| Homo_sapiens_tRNA- | CCTTCCAAGCAGTTGACCCG | CABE | 1945 |
| Gly-TCC-2-5 | | | |
| Homo_sapiens_tRNA- | CTTCCAAGCAGTTGACCCGG | CABE | 1946 |
| Gly-TCC-2-5 | | | |
| Homo_sapiens_tRNA- | GTGGTGAGCATAGCTGCCTT | CABE | 1947 |
| Gly-TCC-2-6 | | | |
| Homo_sapiens_tRNA- | TGGTGAGCATAGCTGCCTTC | CABE | 1948 |
| Gly-TCC-2-6 | | | |
| Homo_sapiens_tRNA- | GGTGAGCATAGCTGCCTTCC | CABE | 1949 |
| Gly-TCC-2-6 | | | |
| Homo_sapiens_tRNA- | GTGAGCATAGCTGCCTTCCA | CABE | 1950 |
| Gly-TCC-2-6 | | | |
| Homo_sapiens_tRNA- | TGAGCATAGCTGCCTTCCAA | CABE | 1951 |
| Gly-TCC-2-6 | | | |
| Homo_sapiens_tRNA- | GAGCATAGCTGCCTTCCAAG | CABE | 1952 |
| Gly-TCC-2-6 | | | |
| Homo_sapiens_tRNA- | AGCATAGCTGCCTTCCAAGC | CABE | 1953 |
| Gly-TCC-2-6 | | | |
| Homo_sapiens_tRNA- | GCATAGCTGCCTTCCAAGCA | CABE | 1954 |
| Gly-TCC-2-6 | | | |
| Homo_sapiens_tRNA- | CATAGCTGCCTTCCAAGCAG | CABE | 1955 |
| Gly-TCC-2-6 | | | |
| Homo_sapiens_tRNA- | ATAGCTGCCTTCCAAGCAGT | CABE | 1956 |
| Gly-TCC-2-6 | | | |
| Homo_sapiens_tRNA- | TAGCTGCCTTCCAAGCAGTT | CABE | 1957 |
| Gly-TCC-2-6 | | | |
| Homo_sapiens_tRNA- | AGCTGCCTTCCAAGCAGTTG | CABE | 1958 |
| Gly-TCC-2-6 | | | |
| Homo_sapiens_tRNA- | GCTGCCTTCCAAGCAGTTGA | CABE | 1959 |
| Gly-TCC-2-6 | | | |
| Homo_sapiens_tRNA- | CTGCCTTCCAAGCAGTTGAC | CABE | 1960 |
| Gly-TCC-2-6 | | | |
| Homo_sapiens_tRNA- | TGCCTTCCAAGCAGTTGACC | CABE | 1961 |
| Gly-TCC-2-6 | | | |
| Homo_sapiens_tRNA- | GCCTTCCAAGCAGTTGACCC | CABE | 1962 |
| Gly-TCC-2-6 | | | |
| Homo_sapiens_tRNA- | CCTTCCAAGCAGTTGACCCG | CABE | 1963 |
| Gly-TCC-2-6 | | | |
| Homo_sapiens_tRNA- | CTTCCAAGCAGTTGACCCGG | CABE | 1964 |
| Gly-TCC-2-6 | | | |
| Homo_sapiens_tRNA- | GTGGTAAGCATAGCTGCCTT | CABE | 1965 |
| Gly-TCC-3-1 | | | |
| Homo_sapiens_tRNA- | TGGTAAGCATAGCTGCCTTC | CABE | 1966 |
| Gly-TCC-3-1 | | | |
| Homo_sapiens_tRNA- | GGTAAGCATAGCTGCCTTCC | CABE | 1967 |
| Gly-TCC-3-1 | | | |
| Homo_sapiens_tRNA- | GTAAGCATAGCTGCCTTCCA | CABE | 1968 |
| Gly-TCC-3-1 | | | |
| Homo_sapiens_tRNA- | TAAGCATAGCTGCCTTCCAA | CABE | 1969 |
| Gly-TCC-3-1 | | | |
| Homo_sapiens_tRNA- | AAGCATAGCTGCCTTCCAAG | CABE | 1970 |
| Gly-TCC-3-1 | | | |
| Homo_sapiens_tRNA- | AGCATAGCTGCCTTCCAAGC | CABE | 1971 |
| Gly-TCC-3-1 | | | |
| Homo_sapiens_tRNA- | GCATAGCTGCCTTCCAAGCA | CABE | 1972 |
| Gly-TCC-3-1 | | | |
| Homo_sapiens_tRNA- | CATAGCTGCCTTCCAAGCAG | CABE | 1973 |
| Gly-TCC-3-1 | | | |
| Homo_sapiens_tRNA- | ATAGCTGCCTTCCAAGCAGT | CABE | 1974 |
| Gly-TCC-3-1 | | | |
| Homo_sapiens_tRNA- | TAGCTGCCTTCCAAGCAGTT | CABE | 1975 |
| Gly-TCC-3-1 | | | |
| Homo_sapiens_tRNA- | AGCTGCCTTCCAAGCAGTTG | CABE | 1976 |
| Gly-TCC-3-1 | | | |
| Homo_sapiens_tRNA- | GCTGCCTTCCAAGCAGTTGA | CABE | 1977 |
| Gly-TCC-3-1 | | | |
| Homo_sapiens_tRNA- | CTGCCTTCCAAGCAGTTGAC | CABE | 1978 |
| Gly-TCC-3-1 | | | |
| Homo_sapiens_tRNA- | TGCCTTCCAAGCAGTTGACC | CABE | 1979 |
| Gly-TCC-3-1 | | | |
| Homo_sapiens_tRNA- | GCCTTCCAAGCAGTTGACCC | CABE | 1980 |
| Gly-TCC-3-1 | | | |
| Homo_sapiens_tRNA- | CCTTCCAAGCAGTTGACCCG | CABE | 1981 |
| Gly-TCC-3-1 | | | |
| Homo_sapiens_tRNA- | CTTCCAAGCAGTTGACCCGG | CABE | 1982 |
| Gly-TCC-3-1 | | | |
| Homo_sapiens_tRNA- | GTGGTGAGCATAGTTGCCTT | CABE | 1983 |
| Gly-TCC-4-1 | | | |
| Homo_sapiens_tRNA- | TGGTGAGCATAGTTGCCTTC | CABE | 1984 |
| Gly-TCC-4-1 | | | |
| Homo_sapiens_tRNA- | GGTGAGCATAGTTGCCTTCC | CABE | 1985 |
| Gly-TCC-4-1 | | | |
| Homo_sapiens_tRNA- | GTGAGCATAGTTGCCTTCCA | CABE | 1986 |
| Gly-TCC-4-1 | | | |
| Homo_sapiens_tRNA- | TGAGCATAGTTGCCTTCCAA | CABE | 1987 |
| Gly-TCC-4-1 | | | |
| Homo_sapiens_tRNA- | GAGCATAGTTGCCTTCCAAG | CABE | 1988 |
| Gly-TCC-4-1 | | | |
| Homo_sapiens_tRNA- | AGCATAGTTGCCTTCCAAGC | CABE | 1989 |
| Gly-TCC-4-1 | | | |
| Homo_sapiens_tRNA- | GCATAGTTGCCTTCCAAGCA | CABE | 1990 |
| Gly-TCC-4-1 | | | |
| Homo_sapiens_tRNA- | CATAGTTGCCTTCCAAGCAG | CABE | 1991 |
| Gly-TCC-4-1 | | | |
| Homo_sapiens_tRNA- | ATAGTTGCCTTCCAAGCAGT | CABE | 1992 |
| Gly-TCC-4-1 | | | |
| Homo_sapiens_tRNA- | TAGTTGCCTTCCAAGCAGTT | CABE | 1993 |
| Gly-TCC-4-1 | | | |
| Homo_sapiens_tRNA- | AGTTGCCTTCCAAGCAGTTG | CABE | 1994 |
| Gly-TCC-4-1 | | | |
| Homo_sapiens_tRNA- | GTTGCCTTCCAAGCAGTTGA | CABE | 1995 |
| Gly-TCC-4-1 | | | |
| Homo_sapiens_tRNA- | TTGCCTTCCAAGCAGTTGAC | CABE | 1996 |
| Gly-TCC-4-1 | | | |
| Homo_sapiens_tRNA- | TGCCTTCCAAGCAGTTGACC | CABE | 1997 |
| Gly-TCC-4-1 | | | |
| Homo_sapiens_tRNA- | GCCTTCCAAGCAGTTGACCC | CABE | 1998 |
| Gly-TCC-4-1 | | | |
| Homo_sapiens_tRNA- | CCTTCCAAGCAGTTGACCCG | CABE | 1999 |
| Gly-TCC-4-1 | | | |
| Homo_sapiens_tRNA- | CTTCCAAGCAGTTGACCCGG | CABE | 2000 |
| Gly-TCC-4-1 | | | |
| Homo_sapiens_tRNA- | GGTTAAGGCGTTGGACTTAA | ACBE | 2001 |
| Leu-TAA-1-1 | | | |
| Homo_sapiens_tRNA- | GTTAAGGCGTTGGACTTAAG | ACBE | 2002 |
| Leu-TAA-1-1 | | | |
| Homo_sapiens_tRNA- | TTAAGGCGTTGGACTTAAGA | ACBE | 2003 |
| Leu-TAA-1-1 | | | |
| Homo_sapiens_tRNA- | TAAGGCGTTGGACTTAAGAT | ACBE | 2004 |
| Leu-TAA-1-1 | | | |
| Homo_sapiens_tRNA- | AAGGCGTTGGACTTAAGATC | ACBE | 2005 |
| Leu-TAA-1-1 | | | |
| Homo_sapiens_tRNA- | AGGCGTTGGACTTAAGATCC | ACBE | 2006 |
| Leu-TAA-1-1 | | | |
| Homo_sapiens_tRNA- | GGCGTTGGACTTAAGATCCA | ACBE | 2007 |
| Leu-TAA-1-1 | | | |
| Homo_sapiens_tRNA- | GCGTTGGACTTAAGATCCAA | ACBE | 2008 |
| Leu-TAA-1-1 | | | |
| Homo_sapiens_tRNA- | CGTTGGACTTAAGATCCAAT | ACBE | 2009 |
| Leu-TAA-1-1 | | | |
| Homo_sapiens_tRNA- | GTTGGACTTAAGATCCAATG | ACBE | 2010 |
| Leu-TAA-1-1 | | | |
| Homo_sapiens_tRNA- | TTGGACTTAAGATCCAATGG | ACBE | 2011 |
| Leu-TAA-1-1 | | | |
| Homo_sapiens_tRNA- | TGGACTTAAGATCCAATGGA | ACBE | 2012 |
| Leu-TAA-1-1 | | | |
| Homo_sapiens_tRNA- | GGACTTAAGATCCAATGGAC | ACBE | 2013 |
| Leu-TAA-1-1 | | | |
| Homo_sapiens_tRNA- | GACTTAAGATCCAATGGACA | ACBE | 2014 |
| Leu-TAA-1-1 | | | |
| Homo_sapiens_tRNA- | GGTTAAGGCGTTGGACTTAA | ACBE | 2015 |
| Leu-TAA-2-1 | | | |
| Homo_sapiens_tRNA- | GTTAAGGCGTTGGACTTAAG | ACBE | 2016 |
| Leu-TAA-2-1 | | | |
| Homo_sapiens_tRNA- | TTAAGGCGTTGGACTTAAGA | ACBE | 2017 |
| Leu-TAA-2-1 | | | |
| Homo_sapiens_tRNA- | TAAGGCGTTGGACTTAAGAT | ACBE | 2018 |
| Leu-TAA-2-1 | | | |
| Homo_sapiens_tRNA- | AAGGCGTTGGACTTAAGATC | ACBE | 2019 |
| Leu-TAA-2-1 | | | |
| Homo_sapiens_tRNA- | AGGCGTTGGACTTAAGATCC | ACBE | 2020 |
| Leu-TAA-2-1 | | | |
| Homo_sapiens_tRNA- | GGCGTTGGACTTAAGATCCA | ACBE | 2021 |
| Leu-TAA-2-1 | | | |
| Homo_sapiens_tRNA- | GCGTTGGACTTAAGATCCAA | ACBE | 2022 |
| Leu-TAA-2-1 | | | |
| Homo_sapiens_tRNA- | CGTTGGACTTAAGATCCAAT | ACBE | 2023 |
| Leu-TAA-2-1 | | | |
| Homo_sapiens_tRNA- | GTTGGACTTAAGATCCAATG | ACBE | 2024 |
| Leu-TAA-2-1 | | | |
| Homo_sapiens_tRNA- | TTGGACTTAAGATCCAATGG | ACBE | 2025 |
| Leu-TAA-2-1 | | | |
| Homo_sapiens_tRNA- | TGGACTTAAGATCCAATGGG | ACBE | 2026 |
| Leu-TAA-2-1 | | | |
| Homo_sapiens_tRNA- | GGACTTAAGATCCAATGGGC | ACBE | 2027 |
| Leu-TAA-2-1 | | | |
| Homo_sapiens_tRNA- | GACTTAAGATCCAATGGGCT | ACBE | 2028 |
| Leu-TAA-2-1 | | | |
| Homo_sapiens_tRNA- | GGTTAAGGCGTTGGACTTAA | ACBE | 2029 |
| Leu-TAA-3-1 | | | |
| Homo_sapiens_tRNA- | GTTAAGGCGTTGGACTTAAG | ACBE | 2030 |
| Leu-TAA-3-1 | | | |
| Homo_sapiens_tRNA- | TTAAGGCGTTGGACTTAAGA | ACBE | 2031 |
| Leu-TAA-3-1 | | | |
| Homo_sapiens_tRNA- | TAAGGCGTTGGACTTAAGAT | ACBE | 2032 |
| Leu-TAA-3-1 | | | |
| Homo_sapiens_tRNA- | AAGGCGTTGGACTTAAGATC | ACBE | 2033 |
| Leu-TAA-3-1 | | | |
| Homo_sapiens_tRNA- | AGGCGTTGGACTTAAGATCC | ACBE | 2034 |
| Leu-TAA-3-1 | | | |
| Homo_sapiens_tRNA- | GGCGTTGGACTTAAGATCCA | ACBE | 2035 |
| Leu-TAA-3-1 | | | |
| Homo_sapiens_tRNA- | GCGTTGGACTTAAGATCCAA | ACBE | 2036 |
| Leu-TAA-3-1 | | | |
| Homo_sapiens_tRNA- | CGTTGGACTTAAGATCCAAT | ACBE | 2037 |
| Leu-TAA-3-1 | | | |
| Homo_sapiens_tRNA- | GTTGGACTTAAGATCCAATG | ACBE | 2038 |
| Leu-TAA-3-1 | | | |
| Homo_sapiens_tRNA- | TTGGACTTAAGATCCAATGG | ACBE | 2039 |
| Leu-TAA-3-1 | | | |
| Homo_sapiens_tRNA- | TGGACTTAAGATCCAATGGA | ACBE | 2040 |
| Leu-TAA-3-1 | | | |
| Homo_sapiens_tRNA- | GGACTTAAGATCCAATGGAT | ACBE | 2041 |
| Leu-TAA-3-1 | | | |
| Homo_sapiens_tRNA- | GACTTAAGATCCAATGGATT | ACBE | 2042 |
| Leu-TAA-3-1 | | | |
| Homo_sapiens_tRNA- | GGTTAAGGCGTTGGACTTAA | ACBE | 2043 |
| Leu-TAA-4-1 | | | |
| Homo_sapiens_tRNA- | GTTAAGGCGTTGGACTTAAG | ACBE | 2044 |
| Leu-TAA-4-1 | | | |
| Homo_sapiens_tRNA- | TTAAGGCGTTGGACTTAAGA | ACBE | 2045 |
| Leu-TAA-4-1 | | | |
| Homo_sapiens_tRNA- | TAAGGCGTTGGACTTAAGAT | ACBE | 2046 |
| Leu-TAA-4-1 | | | |
| Homo_sapiens_tRNA- | AAGGCGTTGGACTTAAGATC | ACBE | 2047 |
| Leu-TAA-4-1 | | | |
| Homo_sapiens_tRNA- | AGGCGTTGGACTTAAGATCC | ACBE | 2048 |
| Leu-TAA-4-1 | | | |
| Homo_sapiens_tRNA- | GGCGTTGGACTTAAGATCCA | ACBE | 2049 |
| Leu-TAA-4-1 | | | |
| Homo_sapiens_tRNA- | GCGTTGGACTTAAGATCCAA | ACBE | 2050 |
| Leu-TAA-4-1 | | | |
| Homo_sapiens_tRNA- | CGTTGGACTTAAGATCCAAT | ACBE | 2051 |
| Leu-TAA-4-1 | | | |
| Homo_sapiens_tRNA- | GTTGGACTTAAGATCCAATG | ACBE | 2052 |
| Leu-TAA-4-1 | | | |
| Homo_sapiens_tRNA- | TTGGACTTAAGATCCAATGG | ACBE | 2053 |
| Leu-TAA-4-1 | | | |
| Homo_sapiens_tRNA- | TGGACTTAAGATCCAATGGA | ACBE | 2054 |
| Leu-TAA-4-1 | | | |
| Homo_sapiens_tRNA- | GGACTTAAGATCCAATGGAC | ACBE | 2055 |
| Leu-TAA-4-1 | | | |
| Homo_sapiens_tRNA- | GACTTAAGATCCAATGGACA | ACBE | 2056 |
| Leu-TAA-4-1 | | | |
| Homo_sapiens_tRNA- | TCGAGTCCAACGCCTTAACC | CABE | 2057 |
| Ser-CGA-1-1 | | | |
| Homo_sapiens_tRNA- | TTCGAGTCCAACGCCTTAAC | CABE | 2058 |
| Ser-CGA-1-1 | | | |
| Homo_sapiens_tRNA- | TTTCGAGTCCAACGCCTTAA | CABE | 2059 |
| Ser-CGA-1-1 | | | |
| Homo_sapiens_tRNA- | ATTTCGAGTCCAACGCCTTA | CABE | 2060 |
| Ser-CGA-1-1 | | | |
| Homo_sapiens_tRNA- | GATTTCGAGTCCAACGCCTT | CABE | 2061 |
| Ser-CGA-1-1 | | | |
| Homo_sapiens_tRNA- | GGATTTCGAGTCCAACGCCT | CABE | 2062 |
| Ser-CGA-1-1 | | | |
| Homo_sapiens_tRNA- | TGGATTTCGAGTCCAACGCC | CABE | 2063 |
| Ser-CGA-1-1 | | | |
| Homo_sapiens_tRNA- | TTGGATTTCGAGTCCAACGC | CABE | 2064 |
| Ser-CGA-1-1 | | | |
| Homo_sapiens_tRNA- | ATTGGATTTCGAGTCCAACG | CABE | 2065 |
| Ser-CGA-1-1 | | | |
| Homo_sapiens_tRNA- | CATTGGATTTCGAGTCCAAC | CABE | 2066 |
| Ser-CGA-1-1 | | | |
| Homo_sapiens_tRNA- | CCATTGGATTTCGAGTCCAA | CABE | 2067 |
| Ser-CGA-1-1 | | | |
| Homo_sapiens_tRNA- | CCCATTGGATTTCGAGTCCA | CABE | 2068 |
| Ser-CGA-1-1 | | | |
| Homo_sapiens_tRNA- | CCCCATTGGATTTCGAGTCC | CABE | 2069 |
| Ser-CGA-1-1 | | | |
| Homo_sapiens_tRNA- | ACCCCATTGGATTTCGAGTC | CABE | 2070 |
| Ser-CGA-1-1 | | | |
| Homo_sapiens_tRNA- | TCGAGTCCAACGCCTTAACC | CABE | 2071 |
| Ser-CGA-2-1 | | | |
| Homo_sapiens_tRNA- | TTCGAGTCCAACGCCTTAAC | CABE | 2072 |
| Ser-CGA-2-1 | | | |
| Homo_sapiens_tRNA- | TTTCGAGTCCAACGCCTTAA | CABE | 2073 |
| Ser-CGA-2-1 | | | |
| Homo_sapiens_tRNA- | ATTTCGAGTCCAACGCCTTA | CABE | 2074 |
| Ser-CGA-2-1 | | | |
| Homo_sapiens_tRNA- | GATTTCGAGTCCAACGCCTT | CABE | 2075 |
| Ser-CGA-2-1 | | | |
| Homo_sapiens_tRNA- | GGATTTCGAGTCCAACGCCT | CABE | 2076 |
| Ser-CGA-2-1 | | | |
| Homo_sapiens_tRNA- | TGGATTTCGAGTCCAACGCC | CABE | 2077 |
| Ser-CGA-2-1 | | | |
| Homo_sapiens_tRNA- | TTGGATTTCGAGTCCAACGC | CABE | 2078 |
| Ser-CGA-2-1 | | | |
| Homo_sapiens_tRNA- | ATTGGATTTCGAGTCCAACG | CABE | 2079 |
| Ser-CGA-2-1 | | | |
| Homo_sapiens_tRNA- | CATTGGATTTCGAGTCCAAC | CABE | 2080 |
| Ser-CGA-2-1 | | | |
| Homo_sapiens_tRNA- | CCATTGGATTTCGAGTCCAA | CABE | 2081 |
| Ser-CGA-2-1 | | | |
| Homo_sapiens_tRNA- | CCCATTGGATTTCGAGTCCA | CABE | 2082 |
| Ser-CGA-2-1 | | | |
| Homo_sapiens_tRNA- | CCCCATTGGATTTCGAGTCC | CABE | 2083 |
| Ser-CGA-2-1 | | | |
| Homo_sapiens_tRNA- | ACCCCATTGGATTTCGAGTC | CABE | 2084 |
| Ser-CGA-2-1 | | | |
| Homo_sapiens_tRNA- | TCGAGTCCAACACCTTAACC | CABE | 2085 |
| Ser-CGA-3-1 | | | |
| Homo_sapiens_tRNA- | TTCGAGTCCAACACCTTAAC | CABE | 2086 |
| Ser-CGA-3-1 | | | |
| Homo_sapiens_tRNA- | TTTCGAGTCCAACACCTTAA | CABE | 2087 |
| Ser-CGA-3-1 | | | |
| Homo_sapiens_tRNA- | ATTTCGAGTCCAACACCTTA | CABE | 2088 |
| Ser-CGA-3-1 | | | |
| Homo_sapiens_tRNA- | GATTTCGAGTCCAACACCTT | CABE | 2089 |
| Ser-CGA-3-1 | | | |
| Homo_sapiens_tRNA- | GGATTTCGAGTCCAACACCT | CABE | 2090 |
| Ser-CGA-3-1 | | | |
| Homo_sapiens_tRNA- | TGGATTTCGAGTCCAACACC | CABE | 2091 |
| Ser-CGA-3-1 | | | |
| Homo_sapiens_tRNA- | TTGGATTTCGAGTCCAACAC | CABE | 2092 |
| Ser-CGA-3-1 | | | |
| Homo_sapiens_tRNA- | ATTGGATTTCGAGTCCAACA | CABE | 2093 |
| Ser-CGA-3-1 | | | |
| Homo_sapiens_tRNA- | CATTGGATTTCGAGTCCAAC | CABE | 2094 |
| Ser-CGA-3-1 | | | |
| Homo_sapiens_tRNA- | CCATTGGATTTCGAGTCCAA | CABE | 2095 |
| Ser-CGA-3-1 | | | |
| Homo_sapiens_tRNA- | CCCATTGGATTTCGAGTCCA | CABE | 2096 |
| Ser-CGA-3-1 | | | |
| Homo_sapiens_tRNA- | CCCCATTGGATTTCGAGTCC | CABE | 2097 |
| Ser-CGA-3-1 | | | |
| Homo_sapiens_tRNA- | CCCCCATTGGATTTCGAGTC | CABE | 2098 |
| Ser-CGA-3-1 | | | |
| Homo_sapiens_tRNA- | TCGAGTCCAACGCCTTAACC | CABE | 2099 |
| Ser-CGA-4-1 | | | |
| Homo_sapiens_tRNA- | TTCGAGTCCAACGCCTTAAC | CABE | 2100 |
| Ser-CGA-4-1 | | | |
| Homo_sapiens_tRNA- | TTTCGAGTCCAACGCCTTAA | CABE | 2101 |
| Ser-CGA-4-1 | | | |
| Homo_sapiens_tRNA- | ATTTCGAGTCCAACGCCTTA | CABE | 2102 |
| Ser-CGA-4-1 | | | |
| Homo_sapiens_tRNA- | GATTTCGAGTCCAACGCCTT | CABE | 2103 |
| Ser-CGA-4-1 | | | |
| Homo_sapiens_tRNA- | GGATTTCGAGTCCAACGCCT | CABE | 2104 |
| Ser-CGA-4-1 | | | |
| Homo_sapiens_tRNA- | TGGATTTCGAGTCCAACGCC | CABE | 2105 |
| Ser-CGA-4-1 | | | |
| Homo_sapiens_tRNA- | TTGGATTTCGAGTCCAACGC | CABE | 2106 |
| Ser-CGA-4-1 | | | |
| Homo_sapiens_tRNA- | ATTGGATTTCGAGTCCAACG | CABE | 2107 |
| Ser-CGA-4-1 | | | |
| Homo_sapiens_tRNA- | CATTGGATTTCGAGTCCAAC | CABE | 2108 |
| Ser-CGA-4-1 | | | |
| Homo_sapiens_tRNA- | CCATTGGATTTCGAGTCCAA | CABE | 2109 |
| Ser-CGA-4-1 | | | |
| Homo_sapiens_tRNA- | CCCATTGGATTTCGAGTCCA | CABE | 2110 |
| Ser-CGA-4-1 | | | |
| Homo_sapiens_tRNA- | CCCCATTGGATTTCGAGTCC | CABE | 2111 |
| Ser-CGA-4-1 | | | |
| Homo_sapiens_tRNA- | ACCCCATTGGATTTCGAGTC | CABE | 2112 |
| Ser-CGA-4-1 | | | |
| Homo_sapiens_tRNA- | TCAAGTCCAACGCCTTAACC | CABE or | 2113 |
| Ser-TGA-1-1 | | CGBE | |
| Homo_sapiens_tRNA- | TTCAAGTCCAACGCCTTAAC | CABE or | 2114 |
| Ser-TGA-1-1 | | CGBE | |
| Homo_sapiens_tRNA- | TTTCAAGTCCAACGCCTTAA | CABE or | 2115 |
| Ser-TGA-1-1 | | CGBE | |
| Homo_sapiens_tRNA- | ATTTCAAGTCCAACGCCTTA | CABE or | 2116 |
| Ser-TGA-1-1 | | CGBE | |
| Homo_sapiens_tRNA- | GATTTCAAGTCCAACGCCTT | CABE or | 2117 |
| Ser-TGA-1-1 | | CGBE | |
| Homo_sapiens_tRNA- | GGATTTCAAGTCCAACGCCT | CABE or | 2118 |
| Ser-TGA-1-1 | | CGBE | |
| Homo_sapiens_tRNA- | TGGATTTCAAGTCCAACGCC | CABE or | 2119 |
| Ser-TGA-1-1 | | CGBE | |
| Homo_sapiens_tRNA- | TTGGATTTCAAGTCCAACGC | CABE or | 2120 |
| Ser-TGA-1-1 | | CGBE | |
| Homo_sapiens_tRNA- | ATTGGATTTCAAGTCCAACG | CABE or | 2121 |
| Ser-TGA-1-1 | | CGBE | |
| Homo_sapiens_tRNA- | CATTGGATTTCAAGTCCAAC | CABE or | 2122 |
| Ser-TGA-1-1 | | CGBE | |
| Homo_sapiens_tRNA- | CCATTGGATTTCAAGTCCAA | CABE or | 2123 |
| Ser-TGA-1-1 | | CGBE | |
| Homo_sapiens_tRNA- | CCCATTGGATTTCAAGTCCA | CABE or | 2124 |
| Ser-TGA-1-1 | | CGBE | |
| Homo_sapiens_tRNA- | CCCCATTGGATTTCAAGTCC | CABE or | 2125 |
| Ser-TGA-1-1 | | CGBE | |
| Homo_sapiens_tRNA- | ACCCCATTGGATTTCAAGTC | CABE or | 2126 |
| Ser-TGA-1-1 | | CGBE | |
| Homo_sapiens_tRNA- | TCAAGTCCATCGCCTTAACC | CABE or | 2127 |
| Ser-TGA-2-1 | | CGBE | |
| Homo_sapiens_tRNA- | TTCAAGTCCATCGCCTTAAC | CABE or | 2128 |
| Ser-TGA-2-1 | | CGBE | |
| Homo_sapiens_tRNA- | TTTCAAGTCCATCGCCTTAA | CABE or | 2129 |
| Ser-TGA-2-1 | | CGBE | |
| Homo_sapiens_tRNA- | ATTTCAAGTCCATCGCCTTA | CABE or | 2130 |
| Ser-TGA-2-1 | | CGBE | |
| Homo_sapiens_tRNA- | GATTTCAAGTCCATCGCCTT | CABE or | 2131 |
| Ser-TGA-2-1 | | CGBE | |
| Homo_sapiens_tRNA- | GGATTTCAAGTCCATCGCCT | CABE or | 2132 |
| Ser-TGA-2-1 | | CGBE | |
| Homo_sapiens_tRNA- | TGGATTTCAAGTCCATCGCC | CABE or | 2133 |
| Ser-TGA-2-1 | | CGBE | |
| Homo_sapiens_tRNA- | ATGGATTTCAAGTCCATCGC | CABE or | 2134 |
| Ser-TGA-2-1 | | CGBE | |
| Homo_sapiens_tRNA- | AATGGATTTCAAGTCCATCG | CABE or | 2135 |
| Ser-TGA-2-1 | | CGBE | |
| Homo_sapiens_tRNA- | CAATGGATTTCAAGTCCATC | CABE or | 2136 |
| Ser-TGA-2-1 | | CGBE | |
| Homo_sapiens_tRNA- | CCAATGGATTTCAAGTCCAT | CABE or | 2137 |
| Ser-TGA-2-1 | | CGBE | |
| Homo_sapiens_tRNA- | CCCAATGGATTTCAAGTCCA | CABE or | 2138 |
| Ser-TGA-2-1 | | CGBE | |
| Homo_sapiens_tRNA- | CCCCAATGGATTTCAAGTCC | CABE or | 2139 |
| Ser-TGA-2-1 | | CGBE | |
| Homo_sapiens_tRNA- | ACCCCAATGGATTTCAAGTC | CABE or | 2140 |
| Ser-TGA-2-1 | | CGBE | |
| Homo_sapiens_tRNA- | TCAAGTCCATCGCCTTAACC | CABE or | 2141 |
| Ser-TGA-3-1 | | CGBE | |
| Homo_sapiens_tRNA- | TTCAAGTCCATCGCCTTAAC | CABE or | 2142 |
| Ser-TGA-3-1 | | CGBE | |
| Homo_sapiens_tRNA- | TTTCAAGTCCATCGCCTTAA | CABE or | 2143 |
| Ser-TGA-3-1 | | CGBE | |
| Homo_sapiens_tRNA- | ATTTCAAGTCCATCGCCTTA | CABE or | 2144 |
| Ser-TGA-3-1 | | CGBE | |
| Homo_sapiens_tRNA- | GATTTCAAGTCCATCGCCTT | CABE or | 2145 |
| Ser-TGA-3-1 | | CGBE | |
| Homo_sapiens_tRNA- | GGATTTCAAGTCCATCGCCT | CABE or | 2146 |
| Ser-TGA-3-1 | | CGBE | |
| Homo_sapiens_tRNA- | TGGATTTCAAGTCCATCGCC | CABE or | 2147 |
| Ser-TGA-3-1 | | CGBE | |
| Homo_sapiens_tRNA- | ATGGATTTCAAGTCCATCGC | CABE or | 2148 |
| Ser-TGA-3-1 | | CGBE | |
| Homo_sapiens_tRNA- | AATGGATTTCAAGTCCATCG | CABE or | 2149 |
| Ser-TGA-3-1 | | CGBE | |
| Homo_sapiens_tRNA- | CAATGGATTTCAAGTCCATC | CABE or | 2150 |
| Ser-TGA-3-1 | | CGBE | |
| Homo_sapiens_tRNA- | CCAATGGATTTCAAGTCCAT | CABE or | 2151 |
| Ser-TGA-3-1 | | CGBE | |
| Homo_sapiens_tRNA- | CCCAATGGATTTCAAGTCCA | CABE or | 2152 |
| Ser-TGA-3-1 | | CGBE | |
| Homo_sapiens_tRNA- | CCCCAATGGATTTCAAGTCC | CABE or | 2153 |
| Ser-TGA-3-1 | | CGBE | |
| Homo_sapiens_tRNA- | ACCCCAATGGATTTCAAGTC | CABE or | 2154 |
| Ser-TGA-3-1 | | CGBE | |
| Homo_sapiens_tRNA- | TCAAGTCCATCGCCTTAACC | CABE or | 2155 |
| Ser-TGA-4-1 | | CGBE | |
| Homo_sapiens_tRNA- | TTCAAGTCCATCGCCTTAAC | CABE or | 2156 |
| Ser-TGA-4-1 | | CGBE | |
| Homo_sapiens_tRNA- | TTTCAAGTCCATCGCCTTAA | CABE or | 2157 |
| Ser-TGA-4-1 | | CGBE | |
| Homo_sapiens_tRNA- | ATTTCAAGTCCATCGCCTTA | CABE or | 2158 |
| Ser-TGA-4-1 | | CGBE | |
| Homo_sapiens_tRNA- | GATTTCAAGTCCATCGCCTT | CABE or | 2159 |
| Ser-TGA-4-1 | | CGBE | |
| Homo_sapiens_tRNA- | GGATTTCAAGTCCATCGCCT | CABE or | 2160 |
| Ser-TGA-4-1 | | CGBE | |
| Homo_sapiens_tRNA- | TGGATTTCAAGTCCATCGCC | CABE or | 2161 |
| Ser-TGA-4-1 | | CGBE | |
| Homo_sapiens_tRNA- | ATGGATTTCAAGTCCATCGC | CABE or | 2162 |
| Ser-TGA-4-1 | | CGBE | |
| Homo_sapiens_tRNA- | AATGGATTTCAAGTCCATCG | CABE or | 2163 |
| Ser-TGA-4-1 | | CGBE | |
| Homo_sapiens_tRNA- | CAATGGATTTCAAGTCCATC | CABE or | 2164 |
| Ser-TGA-4-1 | | CGBE | |
| Homo_sapiens_tRNA- | CCAATGGATTTCAAGTCCAT | CABE or | 2165 |
| Ser-TGA-4-1 | | CGBE | |
| Homo_sapiens_tRNA- | CCCAATGGATTTCAAGTCCA | CABE or | 2166 |
| Ser-TGA-4-1 | | CGBE | |
| Homo_sapiens_tRNA- | CCCCAATGGATTTCAAGTCC | CABE or | 2167 |
| Ser-TGA-4-1 | | CGBE | |
| Homo_sapiens_tRNA- | ACCCCAATGGATTTCAAGTC | CABE or | 2168 |
| Ser-TGA-4-1 | | CGBE | |
| Homo_sapiens_tRNA- | ACGGTAGCGCGTCTGACTCC | CBE | 2169 |
| Trp-CCA-1-1 | | | |
| Homo_sapiens_tRNA- | CGGTAGCGCGTCTGACTCCA | CBE | 2170 |
| Trp-CCA-1-1 | | | |
| Homo_sapiens_tRNA- | GGTAGCGCGTCTGACTCCAG | CBE | 2171 |
| Trp-CCA-1-1 | | | |
| Homo_sapiens_tRNA- | GTAGCGCGTCTGACTCCAGA | CBE | 2172 |
| Trp-CCA-1-1 | | | |
| Homo_sapiens_tRNA- | TAGCGCGTCTGACTCCAGAT | CBE | 2173 |
| Trp-CCA-1-1 | | | |
| Homo_sapiens_tRNA- | AGCGCGTCTGACTCCAGATC | CBE | 2174 |
| Trp-CCA-1-1 | | | |
| Homo_sapiens_tRNA- | GCGCGTCTGACTCCAGATCA | CBE | 2175 |
| Trp-CCA-1-1 | | | |
| Homo_sapiens_tRNA- | CGCGTCTGACTCCAGATCAG | CBE | 2176 |
| Trp-CCA-1-1 | | | |
| Homo_sapiens_tRNA- | GCGTCTGACTCCAGATCAGA | CBE | 2177 |
| Trp-CCA-1-1 | | | |
| Homo_sapiens_tRNA- | CGTCTGACTCCAGATCAGAA | CBE | 2178 |
| Trp-CCA-1-1 | | | |
| Homo_sapiens_tRNA- | GTCTGACTCCAGATCAGAAG | CBE | 2179 |
| Trp-CCA-1-1 | | | |
| Homo_sapiens_tRNA- | TCTGACTCCAGATCAGAAGG | CBE | 2180 |
| Trp-CCA-1-1 | | | |
| Homo_sapiens_tRNA- | CTGACTCCAGATCAGAAGGT | CBE | 2181 |
| Trp-CCA-1-1 | | | |
| Homo_sapiens_tRNA- | TGACTCCAGATCAGAAGGTT | CBE | 2182 |
| Trp-CCA-1-1 | | | |
| Homo_sapiens_tRNA- | GACTCCAGATCAGAAGGTTG | CBE | 2183 |
| Trp-CCA-1-1 | | | |
| Homo_sapiens_tRNA- | ACTCCAGATCAGAAGGTTGC | CBE | 2184 |
| Trp-CCA-1-1 | | | |
| Homo_sapiens_tRNA- | CTCCAGATCAGAAGGTTGCG | CBE | 2185 |
| Trp-CCA-1-1 | | | |
| Homo_sapiens_tRNA- | TCCAGATCAGAAGGTTGCGT | CBE | 2186 |
| Trp-CCA-1-1 | | | |
| Homo_sapiens_tRNA- | ATGGTAGCGCGTCTGACTCC | CBE | 2187 |
| Trp-CCA-2-1 | | | |
| Homo_sapiens_tRNA- | TGGTAGCGCGTCTGACTCCA | CBE | 2188 |
| Trp-CCA-2-1 | | | |
| Homo_sapiens_tRNA- | GGTAGCGCGTCTGACTCCAG | CBE | 2189 |
| Trp-CCA-2-1 | | | |
| Homo_sapiens_tRNA- | GTAGCGCGTCTGACTCCAGA | CBE | 2190 |
| Trp-CCA-2-1 | | | |
| Homo_sapiens_tRNA- | TAGCGCGTCTGACTCCAGAT | CBE | 2191 |
| Trp-CCA-2-1 | | | |
| Homo_sapiens_tRNA- | AGCGCGTCTGACTCCAGATC | CBE | 2192 |
| Trp-CCA-2-1 | | | |
| Homo_sapiens_tRNA- | GCGCGTCTGACTCCAGATCA | CBE | 2193 |
| Trp-CCA-2-1 | | | |
| Homo_sapiens_tRNA- | CGCGTCTGACTCCAGATCAG | CBE | 2194 |
| Trp-CCA-2-1 | | | |
| Homo_sapiens_tRNA- | GCGTCTGACTCCAGATCAGA | CBE | 2195 |
| Trp-CCA-2-1 | | | |
| Homo_sapiens_tRNA- | CGTCTGACTCCAGATCAGAA | CBE | 2196 |
| Trp-CCA-2-1 | | | |
| Homo_sapiens_tRNA- | GTCTGACTCCAGATCAGAAG | CBE | 2197 |
| Trp-CCA-2-1 | | | |
| Homo_sapiens_tRNA- | TCTGACTCCAGATCAGAAGG | CBE | 2198 |
| Trp-CCA-2-1 | | | |
| Homo_sapiens_tRNA- | CTGACTCCAGATCAGAAGGT | CBE | 2199 |
| Trp-CCA-2-1 | | | |
| Homo_sapiens_tRNA- | TGACTCCAGATCAGAAGGTT | CBE | 2200 |
| Trp-CCA-2-1 | | | |
| Homo_sapiens_tRNA- | GACTCCAGATCAGAAGGTTG | CBE | 2201 |
| Trp-CCA-2-1 | | | |
| Homo_sapiens_tRNA- | ACTCCAGATCAGAAGGTTGC | CBE | 2202 |
| Trp-CCA-2-1 | | | |
| Homo_sapiens_tRNA- | CTCCAGATCAGAAGGTTGCG | CBE | 2203 |
| Trp-CCA-2-1 | | | |
| Homo_sapiens_tRNA- | TCCAGATCAGAAGGTTGCGT | CBE | 2204 |
| Trp-CCA-2-1 | | | |
| Homo_sapiens_tRNA- | ACGGTAGCGCGTCTGACTCC | CBE | 2205 |
| Trp-CCA-3-1 | | | |
| Homo_sapiens_tRNA- | CGGTAGCGCGTCTGACTCCA | CBE | 2206 |
| Trp-CCA-3-1 | | | |
| Homo_sapiens_tRNA- | GGTAGCGCGTCTGACTCCAG | CBE | 2207 |
| Trp-CCA-3-1 | | | |
| Homo_sapiens_tRNA- | GTAGCGCGTCTGACTCCAGA | CBE | 2208 |
| Trp-CCA-3-1 | | | |
| Homo_sapiens_tRNA- | TAGCGCGTCTGACTCCAGAT | CBE | 2209 |
| Trp-CCA-3-1 | | | |
| Homo_sapiens_tRNA- | AGCGCGTCTGACTCCAGATC | CBE | 2210 |
| Trp-CCA-3-1 | | | |
| Homo_sapiens_tRNA- | GCGCGTCTGACTCCAGATCA | CBE | 2211 |
| Trp-CCA-3-1 | | | |
| Homo_sapiens_tRNA- | CGCGTCTGACTCCAGATCAG | CBE | 2212 |
| Trp-CCA-3-1 | | | |
| Homo_sapiens_tRNA- | GCGTCTGACTCCAGATCAGA | CBE | 2213 |
| Trp-CCA-3-1 | | | |
| Homo_sapiens_tRNA- | CGTCTGACTCCAGATCAGAA | CBE | 2214 |
| Trp-CCA-3-1 | | | |
| Homo_sapiens_tRNA- | GTCTGACTCCAGATCAGAAG | CBE | 2215 |
| Trp-CCA-3-1 | | | |
| Homo_sapiens_tRNA- | TCTGACTCCAGATCAGAAGG | CBE | 2216 |
| Trp-CCA-3-1 | | | |
| Homo_sapiens_tRNA- | CTGACTCCAGATCAGAAGGT | CBE | 2217 |
| Trp-CCA-3-1 | | | |
| Homo_sapiens_tRNA- | TGACTCCAGATCAGAAGGTT | CBE | 2218 |
| Trp-CCA-3-1 | | | |
| Homo_sapiens_tRNA- | GACTCCAGATCAGAAGGTTG | CBE | 2219 |
| Trp-CCA-3-1 | | | |
| Homo_sapiens_tRNA- | ACTCCAGATCAGAAGGTTGC | CBE | 2220 |
| Trp-CCA-3-1 | | | |
| Homo_sapiens_tRNA- | CTCCAGATCAGAAGGTTGCG | CBE | 2221 |
| Trp-CCA-3-1 | | | |
| Homo_sapiens_tRNA- | TCCAGATCAGAAGGTTGCGT | CBE | 2222 |
| Trp-CCA-3-1 | | | |
| Homo_sapiens_tRNA- | ACGGTAGCGCGTCTGACTCC | CBE | 2223 |
| Trp-CCA-3-2 | | | |
| Homo_sapiens_tRNA- | CGGTAGCGCGTCTGACTCCA | CBE | 2224 |
| Trp-CCA-3-2 | | | |
| Homo_sapiens_tRNA- | GGTAGCGCGTCTGACTCCAG | CBE | 2225 |
| Trp-CCA-3-2 | | | |
| Homo_sapiens_tRNA- | GTAGCGCGTCTGACTCCAGA | CBE | 2226 |
| Trp-CCA-3-2 | | | |
| Homo_sapiens_tRNA- | TAGCGCGTCTGACTCCAGAT | CBE | 2227 |
| Trp-CCA-3-2 | | | |
| Homo_sapiens_tRNA- | AGCGCGTCTGACTCCAGATC | CBE | 2228 |
| Trp-CCA-3-2 | | | |
| Homo_sapiens_tRNA- | GCGCGTCTGACTCCAGATCA | CBE | 2229 |
| Trp-CCA-3-2 | | | |
| Homo_sapiens_tRNA- | CGCGTCTGACTCCAGATCAG | CBE | 2230 |
| Trp-CCA-3-2 | | | |
| Homo_sapiens_tRNA- | GCGTCTGACTCCAGATCAGA | CBE | 2231 |
| Trp-CCA-3-2 | | | |
| Homo_sapiens_tRNA- | CGTCTGACTCCAGATCAGAA | CBE | 2232 |
| Trp-CCA-3-2 | | | |
| Homo_sapiens_tRNA- | GTCTGACTCCAGATCAGAAG | CBE | 2233 |
| Trp-CCA-3-2 | | | |
| Homo_sapiens_tRNA- | TCTGACTCCAGATCAGAAGG | CBE | 2234 |
| Trp-CCA-3-2 | | | |
| Homo_sapiens_tRNA- | CTGACTCCAGATCAGAAGGT | CBE | 2235 |
| Trp-CCA-3-2 | | | |
| Homo_sapiens_tRNA- | TGACTCCAGATCAGAAGGTT | CBE | 2236 |
| Trp-CCA-3-2 | | | |
| Homo_sapiens_tRNA- | GACTCCAGATCAGAAGGTTG | CBE | 2237 |
| Trp-CCA-3-2 | | | |
| Homo_sapiens_tRNA- | ACTCCAGATCAGAAGGTTGC | CBE | 2238 |
| Trp-CCA-3-2 | | | |
| Homo_sapiens_tRNA- | CTCCAGATCAGAAGGTTGCG | CBE | 2239 |
| Trp-CCA-3-2 | | | |
| Homo_sapiens_tRNA- | TCCAGATCAGAAGGTTGCGT | CBE | 2240 |
| Trp-CCA-3-2 | | | |
| Homo_sapiens_tRNA- | ACGGTAGCGCGTCTGACTCC | CBE | 2241 |
| Trp-CCA-3-3 | | | |
| Homo_sapiens_tRNA- | CGGTAGCGCGTCTGACTCCA | CBE | 2242 |
| Trp-CCA-3-3 | | | |
| Homo_sapiens_tRNA- | GGTAGCGCGTCTGACTCCAG | CBE | 2243 |
| Trp-CCA-3-3 | | | |
| Homo_sapiens_tRNA- | GTAGCGCGTCTGACTCCAGA | CBE | 2244 |
| Trp-CCA-3-3 | | | |
| Homo_sapiens_tRNA- | TAGCGCGTCTGACTCCAGAT | CBE | 2245 |
| Trp-CCA-3-3 | | | |
| Homo_sapiens_tRNA- | AGCGCGTCTGACTCCAGATC | CBE | 2246 |
| Trp-CCA-3-3 | | | |
| Homo_sapiens_tRNA- | GCGCGTCTGACTCCAGATCA | CBE | 2247 |
| Trp-CCA-3-3 | | | |
| Homo_sapiens_tRNA- | CGCGTCTGACTCCAGATCAG | CBE | 2248 |
| Trp-CCA-3-3 | | | |
| Homo_sapiens_tRNA- | GCGTCTGACTCCAGATCAGA | CBE | 2249 |
| Trp-CCA-3-3 | | | |
| Homo_sapiens_tRNA- | CGTCTGACTCCAGATCAGAA | CBE | 2250 |
| Trp-CCA-3-3 | | | |
| Homo_sapiens_tRNA- | GTCTGACTCCAGATCAGAAG | CBE | 2251 |
| Trp-CCA-3-3 | | | |
| Homo_sapiens_tRNA- | TCTGACTCCAGATCAGAAGG | CBE | 2252 |
| Trp-CCA-3-3 | | | |
| Homo_sapiens_tRNA- | CTGACTCCAGATCAGAAGGT | CBE | 2253 |
| Trp-CCA-3-3 | | | |
| Homo_sapiens_tRNA- | TGACTCCAGATCAGAAGGTT | CBE | 2254 |
| Trp-CCA-3-3 | | | |
| Homo_sapiens_tRNA- | GACTCCAGATCAGAAGGTTG | CBE | 2255 |
| Trp-CCA-3-3 | | | |
| Homo_sapiens_tRNA- | ACTCCAGATCAGAAGGTTGC | CBE | 2256 |
| Trp-CCA-3-3 | | | |
| Homo_sapiens_tRNA- | CTCCAGATCAGAAGGTTGCG | CBE | 2257 |
| Trp-CCA-3-3 | | | |
| Homo_sapiens_tRNA- | TCCAGATCAGAAGGTTGCGT | CBE | 2258 |
| Trp-CCA-3-3 | | | |
| Homo_sapiens_tRNA- | ACGGTAGCGCGTCTGACTCC | CBE | 2259 |
| Trp-CCA-4-1 | | | |
| Homo_sapiens_tRNA- | CGGTAGCGCGTCTGACTCCA | CBE | 2260 |
| Trp-CCA-4-1 | | | |
| Homo_sapiens_tRNA- | GGTAGCGCGTCTGACTCCAG | CBE | 2261 |
| Trp-CCA-4-1 | | | |
| Homo_sapiens_tRNA- | GTAGCGCGTCTGACTCCAGA | CBE | 2262 |
| Trp-CCA-4-1 | | | |
| Homo_sapiens_tRNA- | TAGCGCGTCTGACTCCAGAT | CBE | 2263 |
| Trp-CCA-4-1 | | | |
| Homo_sapiens_tRNA- | AGCGCGTCTGACTCCAGATC | CBE | 2264 |
| Trp-CCA-4-1 | | | |
| Homo_sapiens_tRNA- | GCGCGTCTGACTCCAGATCA | CBE | 2265 |
| Trp-CCA-4-1 | | | |
| Homo_sapiens_tRNA- | CGCGTCTGACTCCAGATCAG | CBE | 2266 |
| Trp-CCA-4-1 | | | |
| Homo_sapiens_tRNA- | GCGTCTGACTCCAGATCAGA | CBE | 2267 |
| Trp-CCA-4-1 | | | |
| Homo_sapiens_tRNA- | CGTCTGACTCCAGATCAGAA | CBE | 2268 |
| Trp-CCA-4-1 | | | |
| Homo_sapiens_tRNA- | GTCTGACTCCAGATCAGAAG | CBE | 2269 |
| Trp-CCA-4-1 | | | |
| Homo_sapiens_tRNA- | TCTGACTCCAGATCAGAAGG | CBE | 2270 |
| Trp-CCA-4-1 | | | |
| Homo_sapiens_tRNA- | CTGACTCCAGATCAGAAGGC | CBE | 2271 |
| Trp-CCA-4-1 | | | |
| Homo_sapiens_tRNA- | TGACTCCAGATCAGAAGGCT | CBE | 2272 |
| Trp-CCA-4-1 | | | |
| Homo_sapiens_tRNA- | GACTCCAGATCAGAAGGCTG | CBE | 2273 |
| Trp-CCA-4-1 | | | |
| Homo_sapiens_tRNA- | ACTCCAGATCAGAAGGCTGC | CBE | 2274 |
| Trp-CCA-4-1 | | | |
| Homo_sapiens_tRNA- | CTCCAGATCAGAAGGCTGCG | CBE | 2275 |
| Trp-CCA-4-1 | | | |
| Homo_sapiens_tRNA- | TCCAGATCAGAAGGCTGCGT | CBE | 2276 |
| Trp-CCA-4-1 | | | |
| Homo_sapiens_tRNA- | ACGGCAGCGCGTCTGACTCC | CBE | 2277 |
| Trp-CCA-5-1 | | | |
| Homo_sapiens_tRNA- | CGGCAGCGCGTCTGACTCCA | CBE | 2278 |
| Trp-CCA-5-1 | | | |
| Homo_sapiens_tRNA- | GGCAGCGCGTCTGACTCCAG | CBE | 2279 |
| Trp-CCA-5-1 | | | |
| Homo_sapiens_tRNA- | GCAGCGCGTCTGACTCCAGA | CBE | 2280 |
| Trp-CCA-5-1 | | | |
| Homo_sapiens_tRNA- | CAGCGCGTCTGACTCCAGAT | CBE | 2281 |
| Trp-CCA-5-1 | | | |
| Homo_sapiens_tRNA- | AGCGCGTCTGACTCCAGATC | CBE | 2282 |
| Trp-CCA-5-1 | | | |
| Homo_sapiens_tRNA- | GCGCGTCTGACTCCAGATCA | CBE | 2283 |
| Trp-CCA-5-1 | | | |
| Homo_sapiens_tRNA- | CGCGTCTGACTCCAGATCAG | CBE | 2284 |
| Trp-CCA-5-1 | | | |
| Homo_sapiens_tRNA- | GCGTCTGACTCCAGATCAGA | CBE | 2285 |
| Trp-CCA-5-1 | | | |
| Homo_sapiens_tRNA- | CGTCTGACTCCAGATCAGAA | CBE | 2286 |
| Trp-CCA-5-1 | | | |
| Homo_sapiens_tRNA- | GTCTGACTCCAGATCAGAAG | CBE | 2287 |
| Trp-CCA-5-1 | | | |
| Homo_sapiens_tRNA- | TCTGACTCCAGATCAGAAGG | CBE | 2288 |
| Trp-CCA-5-1 | | | |
| Homo_sapiens_tRNA- | CTGACTCCAGATCAGAAGGT | CBE | 2289 |
| Trp-CCA-5-1 | | | |
| Homo_sapiens_tRNA- | TGACTCCAGATCAGAAGGTT | CBE | 2290 |
| Trp-CCA-5-1 | | | |
| Homo_sapiens_tRNA- | GACTCCAGATCAGAAGGTTG | CBE | 2291 |
| Trp-CCA-5-1 | | | |
| Homo_sapiens_tRNA- | ACTCCAGATCAGAAGGTTGC | CBE | 2292 |
| Trp-CCA-5-1 | | | |
| Homo_sapiens_tRNA- | CTCCAGATCAGAAGGTTGCG | CBE | 2293 |
| Trp-CCA-5-1 | | | |
| Homo_sapiens_tRNA- | TCCAGATCAGAAGGTTGCGT | CBE | 2294 |
| Trp-CCA-5-1 | | | |
| Homo_sapiens_tRNA- | TGGTAGAGCAGAGGACTATA | ACBE | 2295 |
| Tyr-ATA-1-1 | | | |
| Homo_sapiens_tRNA- | GGTAGAGCAGAGGACTATAG | ACBE | 2296 |
| Tyr-ATA-1-1 | | | |
| Homo_sapiens_tRNA- | GTAGAGCAGAGGACTATAGC | ACBE | 2297 |
| Tyr-ATA-1-1 | | | |
| Homo_sapiens_tRNA- | TAGAGCAGAGGACTATAGCT | ACBE | 2298 |
| Tyr-ATA-1-1 | | | |
| Homo_sapiens_tRNA- | AGAGCAGAGGACTATAGCTA | ACBE | 2299 |
| Tyr-ATA-1-1 | | | |
| Homo_sapiens_tRNA- | GAGCAGAGGACTATAGCTAC | ACBE | 2300 |
| Tyr-ATA-1-1 | | | |
| Homo_sapiens_tRNA- | AGCAGAGGACTATAGCTACT | ACBE | 2301 |
| Tyr-ATA-1-1 | | | |
| Homo_sapiens_tRNA- | GCAGAGGACTATAGCTACTT | ACBE | 2302 |
| Tyr-ATA-1-1 | | | |
| Homo_sapiens_tRNA- | CAGAGGACTATAGCTACTTC | ACBE | 2303 |
| Tyr-ATA-1-1 | | | |
| Homo_sapiens_tRNA- | AGAGGACTATAGCTACTTCC | ACBE | 2304 |
| Tyr-ATA-1-1 | | | |
| Homo_sapiens_tRNA- | GAGGACTATAGCTACTTCCT | ACBE | 2305 |
| Tyr-ATA-1-1 | | | |
| Homo_sapiens_tRNA- | AGGACTATAGCTACTTCCTC | ACBE | 2306 |
| Tyr-ATA-1-1 | | | |
| Homo_sapiens_tRNA- | GGACTATAGCTACTTCCTCA | ACBE | 2307 |
| Tyr-ATA-1-1 | | | |
| Homo_sapiens_tRNA- | GACTATAGCTACTTCCTCAG | ACBE | 2308 |
| Tyr-ATA-1-1 | | | |
| Homo_sapiens_tRNA- | TACAGTCCTCCGCTCTACCA | CABE | 2309 |
| Tyr-GTA-1-1 | | | |
| Homo_sapiens_tRNA- | CTACAGTCCTCCGCTCTACC | CABE | 2310 |
| Tyr-GTA-1-1 | | | |
| Homo_sapiens_tRNA- | ACTACAGTCCTCCGCTCTAC | CABE | 2311 |
| Tyr-GTA-1-1 | | | |
| Homo_sapiens_tRNA- | AACTACAGTCCTCCGCTCTA | CABE | 2312 |
| Tyr-GTA-1-1 | | | |
| Homo_sapiens_tRNA- | CAACTACAGTCCTCCGCTCT | CABE | 2313 |
| Tyr-GTA-1-1 | | | |
| Homo_sapiens_tRNA- | CCAACTACAGTCCTCCGCTC | CABE | 2314 |
| Tyr-GTA-1-1 | | | |
| Homo_sapiens_tRNA- | GCCAACTACAGTCCTCCGCT | CABE | 2315 |
| Tyr-GTA-1-1 | | | |
| Homo_sapiens_tRNA- | AGCCAACTACAGTCCTCCGC | CABE | 2316 |
| Tyr-GTA-1-1 | | | |
| Homo_sapiens_tRNA- | CAGCCAACTACAGTCCTCCG | CABE | 2317 |
| Tyr-GTA-1-1 | | | |
| Homo_sapiens_tRNA- | ACAGCCAACTACAGTCCTCC | CABE | 2318 |
| Tyr-GTA-1-1 | | | |
| Homo_sapiens_tRNA- | CACAGCCAACTACAGTCCTC | CABE | 2319 |
| Tyr-GTA-1-1 | | | |
| Homo_sapiens_tRNA- | ACACAGCCAACTACAGTCCT | CABE | 2320 |
| Tyr-GTA-1-1 | | | |
| Homo_sapiens_tRNA- | GACACAGCCAACTACAGTCC | CABE | 2321 |
| Tyr-GTA-1-1 | | | |
| Homo_sapiens_tRNA- | GGACACAGCCAACTACAGTC | CABE | 2322 |
| Tyr-GTA-1-1 | | | |
| Homo_sapiens_tRNA- | TACAGTCCTCCGCTCTACCA | CABE | 2323 |
| Tyr-GTA-2-1 | | | |
| Homo_sapiens_tRNA- | CTACAGTCCTCCGCTCTACC | CABE | 2324 |
| Tyr-GTA-2-1 | | | |
| Homo_sapiens_tRNA- | ACTACAGTCCTCCGCTCTAC | CABE | 2325 |
| Tyr-GTA-2-1 | | | |
| Homo_sapiens_tRNA- | CACTACAGTCCTCCGCTCTA | CABE | 2326 |
| Tyr-GTA-2-1 | | | |
| Homo_sapiens_tRNA- | CCACTACAGTCCTCCGCTCT | CABE | 2327 |
| Tyr-GTA-2-1 | | | |
| Homo_sapiens_tRNA- | TCCACTACAGTCCTCCGCTC | CABE | 2328 |
| Tyr-GTA-2-1 | | | |
| Homo_sapiens_tRNA- | ATCCACTACAGTCCTCCGCT | CABE | 2329 |
| Tyr-GTA-2-1 | | | |
| Homo_sapiens_tRNA- | TATCCACTACAGTCCTCCGC | CABE | 2330 |
| Tyr-GTA-2-1 | | | |
| Homo_sapiens_tRNA- | CTATCCACTACAGTCCTCCG | CABE | 2331 |
| Tyr-GTA-2-1 | | | |
| Homo_sapiens_tRNA- | CCTATCCACTACAGTCCTCC | CABE | 2332 |
| Tyr-GTA-2-1 | | | |
| Homo_sapiens_tRNA- | CCCTATCCACTACAGTCCTC | CABE | 2333 |
| Tyr-GTA-2-1 | | | |
| Homo_sapiens_tRNA- | GCCCTATCCACTACAGTCCT | CABE | 2334 |
| Tyr-GTA-2-1 | | | |
| Homo_sapiens_tRNA- | CGCCCTATCCACTACAGTCC | CABE | 2335 |
| Tyr-GTA-2-1 | | | |
| Homo_sapiens_tRNA- | ACGCCCTATCCACTACAGTC | CABE | 2336 |
| Tyr-GTA-2-1 | | | |
| Homo_sapiens_tRNA- | TACAGTCCTCCGCTCTACCA | CABE | 2337 |
| Tyr-GTA-3-1 | | | |
| Homo_sapiens_tRNA- | CTACAGTCCTCCGCTCTACC | CABE | 2338 |
| Tyr-GTA-3-1 | | | |
| Homo_sapiens_tRNA- | CCTACAGTCCTCCGCTCTAC | CABE | 2339 |
| Tyr-GTA-3-1 | | | |
| Homo_sapiens_tRNA- | GCCTACAGTCCTCCGCTCTA | CABE | 2340 |
| Tyr-GTA-3-1 | | | |
| Homo_sapiens_tRNA- | AGCCTACAGTCCTCCGCTCT | CABE | 2341 |
| Tyr-GTA-3-1 | | | |
| Homo_sapiens_tRNA- | GAGCCTACAGTCCTCCGCTC | CABE | 2342 |
| Tyr-GTA-3-1 | | | |
| Homo_sapiens_tRNA- | TGAGCCTACAGTCCTCCGCT | CABE | 2343 |
| Tyr-GTA-3-1 | | | |
| Homo_sapiens_tRNA- | ATGAGCCTACAGTCCTCCGC | CABE | 2344 |
| Tyr-GTA-3-1 | | | |
| Homo_sapiens_tRNA- | AATGAGCCTACAGTCCTCCG | CABE | 2345 |
| Tyr-GTA-3-1 | | | |
| Homo_sapiens_tRNA- | TAATGAGCCTACAGTCCTCC | CABE | 2346 |
| Tyr-GTA-3-1 | | | |
| Homo_sapiens_tRNA- | TTAATGAGCCTACAGTCCTC | CABE | 2347 |
| Tyr-GTA-3-1 | | | |
| Homo_sapiens_tRNA- | CTTAATGAGCCTACAGTCCT | CABE | 2348 |
| Tyr-GTA-3-1 | | | |
| Homo_sapiens_tRNA- | GCTTAATGAGCCTACAGTCC | CABE | 2349 |
| Tyr-GTA-3-1 | | | |
| Homo_sapiens_tRNA- | TGCTTAATGAGCCTACAGTC | CABE | 2350 |
| Tyr-GTA-3-1 | | | |
| Homo_sapiens_tRNA- | TACAGTCCTCCGCTCTACCA | CABE | 2351 |
| Tyr-GTA-4-1 | | | |
| Homo_sapiens_tRNA- | CTACAGTCCTCCGCTCTACC | CABE | 2352 |
| Tyr-GTA-4-1 | | | |
| Homo_sapiens_tRNA- | TCTACAGTCCTCCGCTCTAC | CABE | 2353 |
| Tyr-GTA-4-1 | | | |
| Homo_sapiens_tRNA- | ATCTACAGTCCTCCGCTCTA | CABE | 2354 |
| Tyr-GTA-4-1 | | | |
| Homo_sapiens_tRNA- | AATCTACAGTCCTCCGCTCT | CABE | 2355 |
| Tyr-GTA-4-1 | | | |
| Homo_sapiens_tRNA- | CAATCTACAGTCCTCCGCTC | CABE | 2356 |
| Tyr-GTA-4-1 | | | |
| Homo_sapiens_tRNA- | ACAATCTACAGTCCTCCGCT | CABE | 2357 |
| Tyr-GTA-4-1 | | | |
| Homo_sapiens_tRNA- | TACAATCTACAGTCCTCCGC | CABE | 2358 |
| Tyr-GTA-4-1 | | | |
| Homo_sapiens_tRNA- | ATACAATCTACAGTCCTCCG | CABE | 2359 |
| Tyr-GTA-4-1 | | | |
| Homo_sapiens_tRNA- | TATACAATCTACAGTCCTCC | CABE | 2360 |
| Tyr-GTA-4-1 | | | |
| Homo_sapiens_tRNA- | CTATACAATCTACAGTCCTC | CABE | 2361 |
| Tyr-GTA-4-1 | | | |
| Homo_sapiens_tRNA- | TCTATACAATCTACAGTCCT | CABE | 2362 |
| Tyr-GTA-4-1 | | | |
| Homo_sapiens_tRNA- | GTCTATACAATCTACAGTCC | CABE | 2363 |
| Tyr-GTA-4-1 | | | |
| Homo_sapiens_tRNA- | TGTCTATACAATCTACAGTC | CABE | 2364 |
| Tyr-GTA-4-1 | | | |
| Homo_sapiens_tRNA- | TACAGTCCTCCGCTCTACCA | CABE | 2365 |
| Tyr-GTA-5-1 | | | |
| Homo_sapiens_tRNA- | CTACAGTCCTCCGCTCTACC | CABE | 2366 |
| Tyr-GTA-5-1 | | | |
| Homo_sapiens_tRNA- | GCTACAGTCCTCCGCTCTAC | CABE | 2367 |
| Tyr-GTA-5-1 | | | |
| Homo_sapiens_tRNA- | AGCTACAGTCCTCCGCTCTA | CABE | 2368 |
| Tyr-GTA-5-1 | | | |
| Homo_sapiens_tRNA- | TAGCTACAGTCCTCCGCTCT | CABE | 2369 |
| Tyr-GTA-5-1 | | | |
| Homo_sapiens_tRNA- | GTAGCTACAGTCCTCCGCTC | CABE | 2370 |
| Tyr-GTA-5-1 | | | |
| Homo_sapiens_tRNA- | AGTAGCTACAGTCCTCCGCT | CABE | 2371 |
| Tyr-GTA-5-1 | | | |
| Homo_sapiens_tRNA- | AAGTAGCTACAGTCCTCCGC | CABE | 2372 |
| Tyr-GTA-5-1 | | | |
| Homo_sapiens_tRNA- | GAAGTAGCTACAGTCCTCCG | CABE | 2373 |
| Tyr-GTA-5-1 | | | |
| Homo_sapiens_tRNA- | GGAAGTAGCTACAGTCCTCC | CABE | 2374 |
| Tyr-GTA-5-1 | | | |
| Homo_sapiens_tRNA- | AGGAAGTAGCTACAGTCCTC | CABE | 2375 |
| Tyr-GTA-5-1 | | | |
| Homo_sapiens_tRNA- | GAGGAAGTAGCTACAGTCCT | CABE | 2376 |
| Tyr-GTA-5-1 | | | |
| Homo_sapiens_tRNA- | TGAGGAAGTAGCTACAGTCC | CABE | 2377 |
| Tyr-GTA-5-1 | | | |
| Homo_sapiens_tRNA- | CTGAGGAAGTAGCTACAGTC | CABE | 2378 |
| Tyr-GTA-5-1 | | | |
| Homo_sapiens_tRNA- | TACAGTCCTCCGCTCTACCA | CABE | 2379 |
| Tyr-GTA-5-2 | | | |
| Homo_sapiens_tRNA- | CTACAGTCCTCCGCTCTACC | CABE | 2380 |
| Tyr-GTA-5-2 | | | |
| Homo_sapiens_tRNA- | CCTACAGTCCTCCGCTCTAC | CABE | 2381 |
| Tyr-GTA-5-2 | | | |
| Homo_sapiens_tRNA- | GCCTACAGTCCTCCGCTCTA | CABE | 2382 |
| Tyr-GTA-5-2 | | | |
| Homo_sapiens_tRNA- | CGCCTACAGTCCTCCGCTCT | CABE | 2383 |
| Tyr-GTA-5-2 | | | |
| Homo_sapiens_tRNA- | GCGCCTACAGTCCTCCGCTC | CABE | 2384 |
| Tyr-GTA-5-2 | | | |
| Homo_sapiens_tRNA- | CGCGCCTACAGTCCTCCGCT | CABE | 2385 |
| Tyr-GTA-5-2 | | | |
| Homo_sapiens_tRNA- | GCGCGCCTACAGTCCTCCGC | CABE | 2386 |
| Tyr-GTA-5-2 | | | |
| Homo_sapiens_tRNA- | CGCGCGCCTACAGTCCTCCG | CABE | 2387 |
| Tyr-GTA-5-2 | | | |
| Homo_sapiens_tRNA- | GCGCGCGCCTACAGTCCTCC | CABE | 2388 |
| Tyr-GTA-5-2 | | | |
| Homo_sapiens_tRNA- | GGCGCGCGCCTACAGTCCTC | CABE | 2389 |
| Tyr-GTA-5-2 | | | |
| Homo_sapiens_tRNA- | GGGCGCGCGCCTACAGTCCT | CABE | 2390 |
| Tyr-GTA-5-2 | | | |
| Homo_sapiens_tRNA- | CGGGCGCGCGCCTACAGTCC | CABE | 2391 |
| Tyr-GTA-5-2 | | | |
| Homo_sapiens_tRNA- | ACGGGCGCGCGCCTACAGTC | CABE | 2392 |
| Tyr-GTA-5-2 | | | |
| Homo_sapiens_tRNA- | TACAGTCCTCCGCTCTACCA | CABE | 2393 |
| Tyr-GTA-5-3 | | | |
| Homo_sapiens_tRNA- | CTACAGTCCTCCGCTCTACC | CABE | 2394 |
| Tyr-GTA-5-3 | | | |
| Homo_sapiens_tRNA- | GCTACAGTCCTCCGCTCTAC | CABE | 2395 |
| Tyr-GTA-5-3 | | | |
| Homo_sapiens_tRNA- | GGCTACAGTCCTCCGCTCTA | CABE | 2396 |
| Tyr-GTA-5-3 | | | |
| Homo_sapiens_tRNA- | AGGCTACAGTCCTCCGCTCT | CABE | 2397 |
| Tyr-GTA-5-3 | | | |
| Homo_sapiens_tRNA- | CAGGCTACAGTCCTCCGCTC | CABE | 2398 |
| Tyr-GTA-5-3 | | | |
| Homo_sapiens_tRNA- | ACAGGCTACAGTCCTCCGCT | CABE | 2399 |
| Tyr-GTA-5-3 | | | |
| Homo_sapiens_tRNA- | TACAGGCTACAGTCCTCCGC | CABE | 2400 |
| Tyr-GTA-5-3 | | | |
| Homo_sapiens_tRNA- | CTACAGGCTACAGTCCTCCG | CABE | 2401 |
| Tyr-GTA-5-3 | | | |
| Homo_sapiens_tRNA- | TCTACAGGCTACAGTCCTCC | CABE | 2402 |
| Tyr-GTA-5-3 | | | |
| Homo_sapiens_tRNA- | TTCTACAGGCTACAGTCCTC | CABE | 2403 |
| Tyr-GTA-5-3 | | | |
| Homo_sapiens_tRNA- | TTTCTACAGGCTACAGTCCT | CABE | 2404 |
| Tyr-GTA-5-3 | | | |
| Homo_sapiens_tRNA- | GTTTCTACAGGCTACAGTCC | CABE | 2405 |
| Tyr-GTA-5-3 | | | |
| Homo_sapiens_tRNA- | TGTTTCTACAGGCTACAGTC | CABE | 2406 |
| Tyr-GTA-5-3 | | | |
| Homo_sapiens_tRNA- | TACAGTCCTCCGCTCTACCA | CABE | 2407 |
| Tyr-GTA-5-4 | | | |
| Homo_sapiens_tRNA- | CTACAGTCCTCCGCTCTACC | CABE | 2408 |
| Tyr-GTA-5-4 | | | |
| Homo_sapiens_tRNA- | TCTACAGTCCTCCGCTCTAC | CABE | 2409 |
| Tyr-GTA-5-4 | | | |
| Homo_sapiens_tRNA- | ATCTACAGTCCTCCGCTCTA | CABE | 2410 |
| Tyr-GTA-5-4 | | | |
| Homo_sapiens_tRNA- | AATCTACAGTCCTCCGCTCT | CABE | 2411 |
| Tyr-GTA-5-4 | | | |
| Homo_sapiens_tRNA- | CAATCTACAGTCCTCCGCTC | CABE | 2412 |
| Tyr-GTA-5-4 | | | |
| Homo_sapiens_tRNA- | ACAATCTACAGTCCTCCGCT | CABE | 2413 |
| Tyr-GTA-5-4 | | | |
| Homo_sapiens_tRNA- | TACAATCTACAGTCCTCCGC | CABE | 2414 |
| Tyr-GTA-5-4 | | | |
| Homo_sapiens_tRNA- | GTACAATCTACAGTCCTCCG | CABE | 2415 |
| Tyr-GTA-5-4 | | | |
| Homo_sapiens_tRNA- | TGTACAATCTACAGTCCTCC | CABE | 2416 |
| Tyr-GTA-5-4 | | | |
| Homo_sapiens_tRNA- | CTGTACAATCTACAGTCCTC | CABE | 2417 |
| Tyr-GTA-5-4 | | | |
| Homo_sapiens_tRNA- | TCTGTACAATCTACAGTCCT | CABE | 2418 |
| Tyr-GTA-5-4 | | | |
| Homo_sapiens_tRNA- | GTCTGTACAATCTACAGTCC | CABE | 2419 |
| Tyr-GTA-5-4 | | | |
| Homo_sapiens_tRNA- | TGTCTGTACAATCTACAGTC | CABE | 2420 |
| Tyr-GTA-5-4 | | | |
| Homo_sapiens_tRNA- | TACAGTCCTCCGCTCTACCA | CABE | 2421 |
| Tyr-GTA-5-5 | | | |
| Homo_sapiens_tRNA- | CTACAGTCCTCCGCTCTACC | CABE | 2422 |
| Tyr-GTA-5-5 | | | |
| Homo_sapiens_tRNA- | ACTACAGTCCTCCGCTCTAC | CABE | 2423 |
| Tyr-GTA-5-5 | | | |
| Homo_sapiens_tRNA- | TACTACAGTCCTCCGCTCTA | CABE | 2424 |
| Tyr-GTA-5-5 | | | |
| Homo_sapiens_tRNA- | GTACTACAGTCCTCCGCTCT | CABE | 2425 |
| Tyr-GTA-5-5 | | | |
| Homo_sapiens_tRNA- | AGTACTACAGTCCTCCGCTC | CABE | 2426 |
| Tyr-GTA-5-5 | | | |
| Homo_sapiens_tRNA- | AAGTACTACAGTCCTCCGCT | CABE | 2427 |
| Tyr-GTA-5-5 | | | |
| Homo_sapiens_tRNA- | TAAGTACTACAGTCCTCCGC | CABE | 2428 |
| Tyr-GTA-5-5 | | | |
| Homo_sapiens_tRNA- | TTAAGTACTACAGTCCTCCG | CABE | 2429 |
| Tyr-GTA-5-5 | | | |
| Homo_sapiens_tRNA- | ATTAAGTACTACAGTCCTCC | CABE | 2430 |
| Tyr-GTA-5-5 | | | |
| Homo_sapiens_tRNA- | CATTAAGTACTACAGTCCTC | CABE | 2431 |
| Tyr-GTA-5-5 | | | |
| Homo_sapiens_tRNA- | ACATTAAGTACTACAGTCCT | CABE | 2432 |
| Tyr-GTA-5-5 | | | |
| Homo_sapiens_tRNA- | CACATTAAGTACTACAGTCC | CABE | 2433 |
| Tyr-GTA-5-5 | | | |
| Homo_sapiens_tRNA- | ACACATTAAGTACTACAGTC | CABE | 2434 |
| Tyr-GTA-5-5 | | | |
| Homo_sapiens_tRNA- | TACAGTCCTCCGCTCTACCA | CABE | 2435 |
| Tyr-GTA-6-1 | | | |
| Homo_sapiens_tRNA- | CTACAGTCCTCCGCTCTACC | CABE | 2436 |
| Tyr-GTA-6-1 | | | |
| Homo_sapiens_tRNA- | CCTACAGTCCTCCGCTCTAC | CABE | 2437 |
| Tyr-GTA-6-1 | | | |
| Homo_sapiens_tRNA- | CCCTACAGTCCTCCGCTCTA | CABE | 2438 |
| Tyr-GTA-6-1 | | | |
| Homo_sapiens_tRNA- | CCCCTACAGTCCTCCGCTCT | CABE | 2439 |
| Tyr-GTA-6-1 | | | |
| Homo_sapiens_tRNA- | ACCCCTACAGTCCTCCGCTC | CABE | 2440 |
| Tyr-GTA-6-1 | | | |
| Homo_sapiens_tRNA- | AACCCCTACAGTCCTCCGCT | CABE | 2441 |
| Tyr-GTA-6-1 | | | |
| Homo_sapiens_tRNA- | AAACCCCTACAGTCCTCCGC | CABE | 2442 |
| Tyr-GTA-6-1 | | | |
| Homo_sapiens_tRNA- | CAAACCCCTACAGTCCTCCG | CABE | 2443 |
| Tyr-GTA-6-1 | | | |
| Homo_sapiens_tRNA- | TCAAACCCCTACAGTCCTCC | CABE | 2444 |
| Tyr-GTA-6-1 | | | |
| Homo_sapiens_tRNA- | TTCAAACCCCTACAGTCCTC | CABE | 2445 |
| Tyr-GTA-6-1 | | | |
| Homo_sapiens_tRNA- | ATTCAAACCCCTACAGTCCT | CABE | 2446 |
| Tyr-GTA-6-1 | | | |
| Homo_sapiens_tRNA- | CATTCAAACCCCTACAGTCC | CABE | 2447 |
| Tyr-GTA-6-1 | | | |
| Homo_sapiens_tRNA- | ACATTCAAACCCCTACAGTC | CABE | 2448 |
| Tyr-GTA-6-1 | | | |
| Homo_sapiens_tRNA- | TACAGTCCTCCGCTCTACCA | CABE | 2449 |
| Tyr-GTA-7-1 | | | |
| Homo_sapiens_tRNA- | CTACAGTCCTCCGCTCTACC | CABE | 2450 |
| Tyr-GTA-7-1 | | | |
| Homo_sapiens_tRNA- | TCTACAGTCCTCCGCTCTAC | CABE | 2451 |
| Tyr-GTA-7-1 | | | |
| Homo_sapiens_tRNA- | GTCTACAGTCCTCCGCTCTA | CABE | 2452 |
| Tyr-GTA-7-1 | | | |
| Homo_sapiens_tRNA- | AGTCTACAGTCCTCCGCTCT | CABE | 2453 |
| Tyr-GTA-7-1 | | | |
| Homo_sapiens_tRNA- | CAGTCTACAGTCCTCCGCTC | CABE | 2454 |
| Tyr-GTA-7-1 | | | |
| Homo_sapiens_tRNA- | GCAGTCTACAGTCCTCCGCT | CABE | 2455 |
| Tyr-GTA-7-1 | | | |
| Homo_sapiens_tRNA- | CGCAGTCTACAGTCCTCCGC | CABE | 2456 |
| Tyr-GTA-7-1 | | | |
| Homo_sapiens_tRNA- | CCGCAGTCTACAGTCCTCCG | CABE | 2457 |
| Tyr-GTA-7-1 | | | |
| Homo_sapiens_tRNA- | TCCGCAGTCTACAGTCCTCC | CABE | 2458 |
| Tyr-GTA-7-1 | | | |
| Homo_sapiens_tRNA- | TTCCGCAGTCTACAGTCCTC | CABE | 2459 |
| Tyr-GTA-7-1 | | | |
| Homo_sapiens_tRNA- | TTTCCGCAGTCTACAGTCCT | CABE | 2460 |
| Tyr-GTA-7-1 | | | |
| Homo_sapiens_tRNA- | GTTTCCGCAGTCTACAGTCC | CABE | 2461 |
| Tyr-GTA-7-1 | | | |
| Homo_sapiens_tRNA- | CGTTTCCGCAGTCTACAGTC | CABE | 2462 |
| Tyr-GTA-7-1 | | | |
| Homo_sapiens_tRNA- | TACAGTCCTCCGCTCTACCA | CABE | 2463 |
| Tyr-GTA-8-1 | | | |
| Homo_sapiens_tRNA- | CTACAGTCCTCCGCTCTACC | CABE | 2464 |
| Tyr-GTA-8-1 | | | |
| Homo_sapiens_tRNA- | CCTACAGTCCTCCGCTCTAC | CABE | 2465 |
| Tyr-GTA-8-1 | | | |
| Homo_sapiens_tRNA- | ACCTACAGTCCTCCGCTCTA | CABE | 2466 |
| Tyr-GTA-8-1 | | | |
| Homo_sapiens_tRNA- | AACCTACAGTCCTCCGCTCT | CABE | 2467 |
| Tyr-GTA-8-1 | | | |
| Homo_sapiens_tRNA- | GAACCTACAGTCCTCCGCTC | CABE | 2468 |
| Tyr-GTA-8-1 | | | |
| Homo_sapiens_tRNA- | TGAACCTACAGTCCTCCGCT | CABE | 2469 |
| Tyr-GTA-8-1 | | | |
| Homo_sapiens_tRNA- | ATGAACCTACAGTCCTCCGC | CABE | 2470 |
| Tyr-GTA-8-1 | | | |
| Homo_sapiens_tRNA- | AATGAACCTACAGTCCTCCG | CABE | 2471 |
| Tyr-GTA-8-1 | | | |
| Homo_sapiens_tRNA- | TAATGAACCTACAGTCCTCC | CABE | 2472 |
| Tyr-GTA-8-1 | | | |
| Homo_sapiens_tRNA- | TTAATGAACCTACAGTCCTC | CABE | 2473 |
| Tyr-GTA-8-1 | | | |
| Homo_sapiens_tRNA- | TTTAATGAACCTACAGTCCT | CABE | 2474 |
| Tyr-GTA-8-1 | | | |
| Homo_sapiens_tRNA- | GTTTAATGAACCTACAGTCC | CABE | 2475 |
| Tyr-GTA-8-1 | | | |
| Homo_sapiens_tRNA- | AGTTTAATGAACCTACAGTC | CABE | 2476 |
| Tyr-GTA-8-1 | | | |
| Homo_sapiens_tRNA- | TACAGTCCTCCGCTCTACCA | CABE | 2477 |
| Tyr-GTA-9-1 | | | |
| Homo_sapiens_tRNA- | CTACAGTCCTCCGCTCTACC | CABE | 2478 |
| Tyr-GTA-9-1 | | | |
| Homo_sapiens_tRNA- | CCTACAGTCCTCCGCTCTAC | CABE | 2479 |
| Tyr-GTA-9-1 | | | |
| Homo_sapiens_tRNA- | ACCTACAGTCCTCCGCTCTA | CABE | 2480 |
| Tyr-GTA-9-1 | | | |
| Homo_sapiens_tRNA- | CACCTACAGTCCTCCGCTCT | CABE | 2481 |
| Tyr-GTA-9-1 | | | |
| Homo_sapiens_tRNA- | GCACCTACAGTCCTCCGCTC | CABE | 2482 |
| Tyr-GTA-9-1 | | | |
| Homo_sapiens_tRNA- | TGCACCTACAGTCCTCCGCT | CABE | 2483 |
| Tyr-GTA-9-1 | | | |
| Homo_sapiens_tRNA- | GTGCACCTACAGTCCTCCGC | CABE | 2484 |
| Tyr-GTA-9-1 | | | |
| Homo_sapiens_tRNA- | CGTGCACCTACAGTCCTCCG | CABE | 2485 |
| Tyr-GTA-9-1 | | | |
| Homo_sapiens_tRNA- | GCGTGCACCTACAGTCCTCC | CABE | 2486 |
| Tyr-GTA-9-1 | | | |
| Homo_sapiens_tRNA- | GGCGTGCACCTACAGTCCTC | CABE | 2487 |
| Tyr-GTA-9-1 | | | |
| Homo_sapiens_tRNA- | GGGCGTGCACCTACAGTCCT | CABE | 2488 |
| Tyr-GTA-9-1 | | | |
| Homo_sapiens_tRNA- | CGGGCGTGCACCTACAGTCC | CABE | 2489 |
| Tyr-GTA-9-1 | | | |
| Homo_sapiens_tRNA- | ACGGGCGTGCACCTACAGTC | CABE | 2490 |
| Tyr-GTA-9-1 | | | |

napDNAbp Domain

[0146] In some embodiments, the base editors of the present disclosure comprises a (napDNAbp) domain. Any suitable napDNAbp domain known in the art may be used in the base editors described herein, such as those described in detail in United State Patent Application [[XXXX]] by David Liu, et al., filed on Jan. 11, 2021, which is incorporated herein by reference in its entirety. For example, in various embodiments, the napDNAbp may be any Class 2 CRISPR-Cas system, including any type II, type V, or type VI CRISPR-Cas enzyme. Given the rapid development of CRISPR-Cas as a tool for genome editing, there have been constant developments in the nomenclature used to describe and/or identify CRISPR-Cas enzymes, such as Cas9 and Cas9 orthologs. This application references CRISPR-Cas enzymes with nomenclature that may be old and/or new as described in U.S. Patent Application 63/136,194 (described elsewhere herein) or Makarova et al., The CRISPR Journal, Vol. 1, No. 5, 2018, which is incorporated herein by reference in its entirety.

[0147] Other napDNAbps are also possible in other embodiments. For example, in some embodiments, the napDNAbp comprises the canonical SpCas9, or any ortholog Cas9 protein, or any variant Cas9 protein—including any naturally occurring variant, mutant, or otherwise engineered version of Cas9—that is known or that may be made or evolved through a directed evolutionary or otherwise mutagenic process. In various embodiments, the Cas9 or Cas9 variants have a nickase activity, i.e., only cleave one strand of the target DNA sequence. In other embodiments, the Cas9 or Cas9 variants have inactive nucleases, i.e., are “dead” Cas9 proteins. Other variant Cas9 proteins that may be used are those having a smaller molecular weight than the canonical SpCas9 (e.g., for easier delivery) or having modified or rearranged primary amino acid structure (e.g., the circular permutant formats).

[0148] In various embodiments described herein, the base editors comprise a napDNAbp, such as a Cas9 protein. These proteins are “programmable” by way of their becoming complexed with a guide RNA (or a pegRNA, as the case may be), which guides the Cas9 protein to a target site on the DNA which possess a sequence that is complementary to the spacer portion of the gRNA (or pegRNA) and also which possesses the required PAM sequence. However, in certain embodiment envisioned here, the napDNAbp may be substituted with a different type of programmable protein, such as a zinc finger nuclease or a transcription activator-like effector nuclease (TALEN). See U.S. Ser. No. 12/965,590; U.S. Ser. No. 13/426,991 (U.S. Pat. No. 8,450,471); U.S. Ser. No. 13/427,040 (U.S. Pat. No. 8,440,431); U.S. Ser. No. 13/427,137 (U.S. Pat. No. 8,440,432); and U.S. Ser. No. 13/738,381, all of which are incorporated by reference herein in their entirety. In addition, TALENS are described in WO 2015/027134, U.S. Pat. No. 9,181,535, Boch et al., “Breaking the Code of DNA Binding Specificity of TAL-Type III Effectors”, Science, vol. 326, pp. 1509-1512 (2009), Bogdanove et al., TAL Effectors: Customizable Proteins for DNA Targeting, Science, vol. 333, pp. 1843-1846 (2011), Cade et al., “Highly efficient generation of heritable zebrafish gene mutations using homo- and heterodimeric TALENs”, Nucleic Acids Research, vol. 40, pp. 8001-8010 (2012), and Cermak et al., “Efficient design and assembly of custom TALEN and other TAL effector-based constructs for DNA targeting”, Nucleic Acids Research, vol. 39, No. 17, e82 (2011), each of which are incorporated herein by reference. See also, for example, in Carroll et al., “Genome Engineering with Zinc-Finger Nucleases,” Genetics, August 2011, Vol. 188: 773-782; Durai et al., “Zinc finger nucleases: custom-designed molecular scissors for genome engineering of plant and mammalian cells,” Nucleic Acids Res, 2005, Vol. 33: 5978-90; and Gaj et al., “ZFN, TALEN, and CRISPR/Cas-based methods for genome engineering,” Trends Biotechnol. 2013, Vol. 31: 397-405, each of which are incorporated herein by reference in their entireties.

### Transition and Transversion Base Editors

### Base Editing and Deaminase Domains

[0149] In some embodiments, the fusion proteins described herein comprise a deaminase domain (e.g., when the Cas proteins provided herein are being used in the context of a base editor). A deaminase domain may be a cytosine deaminase domain or an adenosine deaminase domain.

[0150] Base editor fusion proteins that convert a C to T, in some embodiments, comprise a cytosine deaminase. A “cytosine deaminase” refers to an enzyme that catalyzes the chemical reaction “cytosine+H2O→uracil+NH3” or “5-methyl-cytosine+H2O→thymine+NH3.” As it may be apparent from the reaction formula, such chemical reactions result in a C to U/T nucleobase change. In the context of a gene, such a nucleotide change, or mutation, may in turn lead to an amino acid change in the protein, which may affect the protein's function, e.g., loss-of-function or gain-of-function. In some embodiments, the C to T base editor comprises a Cas14a1 variant provided herein fused to a cytosine deaminase. In some embodiments, the cytosine deaminase domain is fused to the N-terminus of the Cas14a1 variant.

[0151] Non-limiting examples of suitable cytosine deaminase domains are provided below, as SEQ ID NOs: 17-50.

Human AID
(SEQ ID NO: 17)
MDSLLMNRRKFLYQFKNVRWAKGRRETYLCYVVKRRDSATSFSLDFGYLR
NKNGCHVELLFLRYISDWDLDPGRCYRVTWFTSWSPCYDCARHVADFLRGNPNLSLRI
FTARLYFCEDRKAEPEGLRRLHRAGVQIAIMTFKDYFYCWNTFVENHERTFKAWEGLH
ENSVRLSRQLRRILLPLYEVDDLRDAFRTLGL
Mouse AID
(SEQ ID NO: 18)
MDSLLMKQKKFLYHFKNVRWAKGRHETYLCYVVKRRDSATSCSLDFGHLR
NKSGCHVELLFLRYISDWDLDPGRCYRVTWFTSWSPCYDCARHVAEFLRWNPNLSLRIF
TARLYFCEDRKAEPEGLRRLHRAGVQIGIMTFKDYFYCWNTFVENRERTFKAWEGLHE
NSVRLTRQLRRILLPLYEVDDLRDAFRMLGF
Dog AID
(SEQ ID NO: 19)
MDSLLMKQRKFLYHFKNVRWAKGRHETYLCYVVKRRDSATSFSLDFGHLR
NKSGCHVELLFLRYISDWDLDPGRCYRVTWFTSWSPCYDCARHVADFLRGYPNLSLRIF
AARLYFCEDRKAEPEGLRRLHRAGVQIAIMTFKDYFYCWNTFVENREKTFKAWEGLHE
NSVRLSRQLRRILLPLYEVDDLRDAFRTLGL
Bovine AID
(SEQ ID NO: 20)
MDSLLKKQRQFLYQFKNVRWAKGRHETYLCYVVKRRDSPTSFSLDFGHLRN
KAGCHVELLFLRYISDWDLDPGRCYRVTWFTSWSPCYDCARHVADFLRGYPNLSLRIFT
ARLYFCDKERKAEPEGLRRLHRAGVQIAIMTFKDYFYCWNTFVENHERTFKAWEGLHE
NSVRLSRQLRRILLPLYEVDDLRDAFRTLGL
Mouse APOBEC-3
(SEQ ID NO: 21)
MGPFCLGCSHRKCYSPIRNLISQETFKFHFKNLGYAKGRKDTFLCYEVTRKD
CDSPVSLHHGVFKNKDNIHAEICFLYWFHDKVLKVLSPREEFKITWYMSWSPCFECAEQ
IVRFLATHHNLSLDIFSSRLYNVQDPETQQNLCRLVQEGAQVAAMDLYEFKKCWKKFV
DNGGRRFRPWKRLLTNFRYQDSKLQEILRPCYIPVPSSSSSTLSNICLTKGLPETRFCVEG
RRMDPLSEEEFYSQFYNQRVKHLCYYHRMKPYLCYQLEQFNGQAPLKGCLLSEKGKQ
HAEILFLDKIRSMELSQVTITCYLTWSPCPNCAWQLAAFKRDRPDLILHIYTSRLYFHWK
RPFQKGLCSLWQSGILVDVMDLPQFTDCWTNFVNPKRPFWPWKGLEIISRRTQRRLRRI
KESWGLQDLVNDFGNLQLGPPMS
Rat APOBEC-3
(SEQ ID NO: 22)
MGPFCLGCSHRKCYSPIRNLISQETFKFHFKNLRYAIDRKDTFLCYEVTRKDC
DSPVSLHHGVFKNKDNIHAEICFLYWFHDKVLKVLSPREEFKITWYMSWSPCFECAEQV
LRFLATHHNLSLDIFSSRLYNIRDPENQQNLCRLVQEGAQVAAMDLYEFKKCWKKFVD
NGGRRFRPWKKLLTNFRYQDSKLQEILRPCYIPVPSSSSSTLSNICLTKGLPETRFCVERR
RVHLLSEEEFYSQFYNQRVKHLCYYHGVKPYLCYQLEQFNGQAPLKGCLLSEKGKQHA
EILFLDKIRSMELSQVIITCYLTWSPCPNCAWQLAAFKRDRPDLILHIYTSRLYFHWKRPF
QKGLCSLWQSGILVDVMDLPQFTDCWTNFVNPKRPFWPWKGLEIISRRTQRRLHRIKES
WGLQDLVNDFGNLQLGPPMS
Rhesus macaque APOBEC-3G
(SEQ ID NO: 23)
MVEPMDPRTFVSNFNNRPILSGLNTVWLCCEVKTKDPSGPPLDAKIFQGKVY
SKAKYHPEMRFLRWFHKWRQLHHDQEYKVTWYVSWSPCTRCANSVATFLAKDPKVT
LTIFVARLYYFWKPDYQQALRILCQKRGGPHATMKIMNYNEFQDCWNKFVDGRGKPF
KPRNNLPKHYTLLQATLGELLRHLMDPGTFTSNFNNKPWVSGQHETYLCYKVERLHND
TWVPLNQHRGFLRNQAPNIHGFPKGRHAELCFLDLIPFWKLDGQQYRVTCFTSWSPCFS
CAQEMAKFISNNEHVSLCIFAARIYDDQGRYQEGLRALHRDGAKIAMMNYSEFEYCWD
TFVDRQGRPFQPWDGLDEHSQALSGRLRAI
Chimpanzee APOBEC-3G
(SEQ ID NO: 24)
MKPHFRNPVERMYQDTFSDNFYNRPILSHRNTVWLCYEVKTKGPSRPPLDA
KIFRGQVYSKLKYHPEMRFFHWFSKWRKLHRDQEYEVTWYISWSPCTKCTRDVATFLA
EDPKVTLTIFVARLYYFWDPDYQEALRSLCQKRDGPRATMKIMNYDEFQHCWSKFVYS
QRELFEPWNNLPKYYILLHIMLGEILRHSMDPPTFTSNFNNELWVRGRHETYLCYEVERL
HNDTWVLLNQRRGFLCNQAPHKHGFLEGRHAELCFLDVIPFWKLDLHQDYRVTCFTSW
SPCFSCAQEMAKFISNNKHVSLCIFAARIYDDQGRCQEGLRTLAKAGAKISIMTYSEFKH
CWDTFVDHQGCPFQPWDGLEEHSQALSGRLRAILQNQGN
Green monkey APOBEC-3G
(SEQ ID NO: 25)
MNPQIRNMVEQMEPDIFVYYFNNRPILSGRNTVWLCYEVKTKDPSGPPLDAN
IFQGKLYPEAKDHPEMKFLHWFRKWRQLHRDQEYEVTWYVSWSPCTRCANSVATFLA
EDPKVTLTIFVARLYYFWKPDYQQALRILCQERGGPHATMKIMNYNEFQHCWNEFVDG
QGKPFKPRKNLPKHYTLLHATLGELLRHVMDPGTFTSNFNNKPWVSGQRETYLCYKVE
RSHNDTWVLLNQHRGFLRNQAPDRHGFPKGRHAELCFLDLIPFWKLDDQQYRVTCFTS
WSPCFSCAQKMAKFISNNKHVSLCIFAARIYDDQGRCQEGLRTLHRDGAKIAVMNYSEF
EYCWDTFVDRQGRPFQPWDGLDEHSQALSGRLRAI
Human APOBEC-3G
(SEQ ID NO: 26)
MKPHFRNTVERMYRDTFSYNFYNRPILSRRNTVWLCYEVKTKGPSRPPLDAK
IFRGQVYSELKYHPEMRFFHWFSKWRKLHRDQEYEVTWYISWSPCTKCTRDMATFLAE
DPKVTLTIFVARLYYFWDPDYQEALRSLCQKRDGPRATMKIMNYDEFQHCWSKFVYSQ
RELFEPWNNLPKYYILLHIMLGEILRHSMDPPTFTFNFNNEPWVRGRHETYLCYEVERM
HNDTWVLLNQRRGFLCNQAPHKHGFLEGRHAELCFLDVIPFWKLDLDQDYRVTCFTSW
SPCFSCAQEMAKFISKNKHVSLCIFTARIYDDQGRCQEGLRTLAEAGAKISIMTYSEFKH
CWDTFVDHQGCPFQPWDGLDEHSQDLSGRLRAILQNQEN
Human APOBEC-3F
(SEQ ID NO: 27)
MKPHFRNTVERMYRDTFSYNFYNRPILSRRNTVWLCYEVKTKGPSRPRLDA
KIFRGQVYSQPEHHAEMCFLSWFCGNQLPAYKCFQITWFVSWTPCPDCVAKLAEFLAE
HPNVTLTISAARLYYYWERDYRRALCRLSQAGARVKIMDDEEFAYCWENFVYSEGQPF
MPWYKFDDNYAFLHRTLKEILRNPMEAMYPHIFYFHFKNLRKAYGRNESWLCFTMEV
VKHHSPVSWKRGVFRNQVDPETHCHAERCFLSWFCDDILSPNTNYEVTWYTSWSPCPE
CAGEVAEFLARHSNVNLTIFTARLYYFWDTDYQEGLRSLSQEGASVEIMGYKDFKYCW
ENFVYNDDEPFKPWKGLKYNFLFLDSKLQEILE
Human APOBEC-3B
(SEQ ID NO: 28)
MNPQIRNPMERMYRDTFYDNFENEPILYGRSYTWLCYEVKIKRGRSNLLWD
TGVFRGQVYFKPQYHAEMCFLSWFCGNQLPAYKCFQITWFVSWTPCPDCVAKLAEFLS
EHPNVTLTISAARLYYYWERDYRRALCRLSQAGARVTIMDYEEFAYCWENFVYNEGQQ
FMPWYKFDENYAFLHRTLKEILRYLMDPDTFTFNFNNDPLVLRRRQTYLCYEVERLDN
GTWVLMDQHMGFLCNEAKNLLCGFYGRHAELRFLDLVPSLQLDPAQIYRVTWFISWSP
CFSWGCAGEVRAFLQENTHVRLRIFAARIYDYDPLYKEALQMLRDAGAQVSIMTYDEF
EYCWDTFVYRQGCPFQPWDGLEEHSQALSGRLRAILQNQGN
Human APOBEC-3C
(SEQ ID NO: 29)
MNPQIRNPMKAMYPGTFYFQFKNLWEANDRNETWLCFTVEGIKRRSVVSW
KTGVFRNQVDSETHCHAERCFLSWFCDDILSPNTKYQVTWYTSWSPCPDCAGEVAEFL
ARHSNVNLTIFTARLYYFQYPCYQEGLRSLSQEGVAVEIMDYEDFKYCWENFVYNDNE
PFKPWKGLKTNFRLLKRRLRESLQ
Human APOBEC-3A
(SEQ ID NO: 30)
MEASPASGPRHLMDPHIFTSNFNNGIGRHKTYLCYEVERLDNGTSVKMDQH
RGFLHNQAKNLLCGFYGRHAELRFLDLVPSLQLDPAQIYRVTWFISWSPCFSWGCAGEV
RAFLQENTHVRLRIFAARIYDYDPLYKEALQMLRDAGAQVSIMTYDEFKHCWDTFVDH
QGCPFQPWDGLDEHSQALSGRLRAILQNQGN
Human APOBEC-3H
(SEQ ID NO: 31)
MALLTAETFRLQFNNKRRLRRPYYPRKALLCYQLTPQNGSTPTRGYFENKKK
CHAEICFINEIKSMGLDETQCYQVTCYLTWSPCSSCAWELVDFIKAHDHLNLGIFASRLY
YHWCKPQQKGLRLLCGSQVPVEVMGFPKFADCWENFVDHEKPLSFNPYKMLEELDKN
SRAIKRRLERIKIPGVRAQGRYMDILCDAEV
Human APOBEC-3D
(SEQ ID NO: 32)
MNPQIRNPMERMYRDTFYDNFENEPILYGRSYTWLCYEVKIKRGRSNLLWD
TGVFRGPVLPKRQSNHRQEVYFRFENHAEMCFLSWFCGNRLPANRRFQITWFVSWNPC
LPCVVKVTKFLAEHPNVTLTISAARLYYYRDRDWRWVLLRLHKAGARVKIMDYEDFA
YCWENFVCNEGQPFMPWYKFDDNYASLHRTLKEILRNPMEAMYPHIFYFHFKNLLKAC
GRNESWLCFTMEVTKHHSAVFRKRGVFRNQVDPETHCHAERCFLSWFCDDILSPNTNY
EVTWYTSWSPCPECAGEVAEFLARHSNVNLTIFTARLCYFWDTDYQEGLCSLSQEGASV
KIMGYKDFVSCWKNFVYSDDEPFKPWKGLQTNFRLLKRRLREILQ
Human APOBEC-1
(SEQ ID NO: 33)
MTSEKGPSTGDPTLRRRIEPWEFDVFYDPRELRKEACLLYEIKWGMSRKIWR
SSGKNTTNHVEVNFIKKFTSERDFHPSMSCSITWFLSWSPCWECSQAIREFLSRHPGVTL
VIYVARLFWHMDQQNRQGLRDLVNSGVTIQIMRASEYYHCWRNFVNYPPGDEAHWPQ
YPPLWMMLYALELHCIILSLPPCLKISRRWQNHLTFFRLHLQNCHYQTIPPHILLATGLIH
PSVAWR
Mouse APOBEC-1
(SEQ ID NO: 34)
MSSETGPVAVDPTLRRRIEPHEFEVFFDPRELRKETCLLYEINWGGRHSVWRH
TSQNTSNHVEVNFLEKFTTERYFRPNTRCSITWFLSWSPCGECSRAITEFLSRHPYVTLFI
YIARLYHHTDQRNRQGLRDLISSGVTIQIMTEQEYCYCWRNFVNYPPSNEAYWPRYPHL
WVKLYVLELYCIILGLPPCLKILRRKQPQLTFFTITLQTCHYQRIPPHLLWATGLK
Rat APOBEC-1
(SEQ ID NO: 35)
[sequence omitted]
Petromyzon marinus CDA1 (pmCDA1)
(SEQ ID NO: 36)
MTDAEYVRIHEKLDIYTFKKQFFNNKKSVSHRCYVLFELKRRGERRACFWG
YAVNKPQSGTERGIHAEIFSIRKVEEYLRDNPGQFTINWYSSWSPCADCAEKILEWYNQE
LRGNGHTLKIWACKLYYEKNARNQIGLWNLRDNGVGLNVMVSEHYQCCRKIFIQSSHN
QLNENRWLEKTLKRAEKRRSELSIMIQVKILHTTKSPAV
Evolved pmCDA1 (evoCDA1)
(SEQ ID NO: 37)
MTDAEYVRIHEKLDIYTFKKQFSNNKKSVSHRCYVLFELKRRGERRACFWG
YAVNKPQSGTERGIHAEIFSIRKVEEYLRDNPGQFTINWYSSWSPCADCAEKILEWYNQE
LRGNGHTLKIWVCKLYYEKNARNQIGLWNLRDNGVGLNVMVSEHYQCCRKIFIQSSHN
QLNENRWLEKTLKRAEKRRSELSIMFQVKILHTTKSPAV
Human APOBEC3G D316R_D317R
(SEQ ID NO: 38)
MKPHFRNTVERMYRDTFSYNFYNRPILSRRNTVWLCYEVKTKGPSRPPLDAK
IFRGQVYSELKYHPEMRFFHWFSKWRKLHRDQEYEVTWYISWSPCTKCTRDMATFLAE
DPKVTLTIFVARLYYFWDPDYQEALRSLCQKRDGPRATMKIMNYDEFQHCWSKFVYSQ
RELFEPWNNLPKYYILLHIMLGEILRHSMDPPTFTFNFNNEPWVRGRHETYLCYEVERM
HNDTWVLLNQRRGFLCNQAPHKHGFLEGRHAELCFLDVIPFWKLDLDQDYRVTCFTSW
SPCFSCAQEMAKFISKNKHVSLCIFTARIYRRQGRCQEGLRTLAEAGAKISIMTYSEFKHC
WDTFVDHQGCPFQPWDGLDEHSQDLSGRLRAILQNQEN
Human APOBEC3G chain A
(SEQ ID NO: 39)
MDPPTFTFNFNNEPWVRGRHETYLCYEVERMHNDTWVLLNQRRGFLCNQA
PHKHGFLEGRHAELCFLDVIPFWKLDLDQDYRVTCFTSWSPCFSCAQEMAKFISKNKHV
SLCIFTARIYDDQGRCQEGLRTLAEAGAKISIMTYSEFKHCWDTFVDHQGCPFQPWDGL
DEHSQDLSGRLRAILQ
Human APOBEC3G chain A D120R_D121R
(SEQ ID NO: 40)
MDPPTFTFNFNNEPWVRGRHETYLCYEVERMHNDTWVLLNQRRGFLCNQA
PHKHGFLEGRHAELCFLDVIPFWKLDLDQDYRVTCFTSWSPCFSCAQEMAKFISKNKHV
SLCIFTARIYRRQGRCQEGLRTLAEAGAKISIMTYSEFKHCWDTFVDHQGCPFQPWDGL
DEHSQDLSGRLRAILQ
evo APOBEC1
(SEQ ID NO: 41)
MSSKTGPVAVDPTLRRRIEPHEFEVFFDPRELRKETCLLYEINWGGRHSIWRH
TSQNTNKHVEVNFIEKFTTERYFCPNTRCSITWFLSWSPCGECSRAITEFLSRYPNVTLFIY
IARLYHLANPRNRQGLRDLISSGVTIQIMTEQESGYCWHNFVNYSPSNESHWPRYPHLW
VRLYVLELYCIILGLPPCLNILRRKQSQLTSFTIALQSCHYQRLPPHILWATGLK
YE1
(SEQ ID NO: 42)
MSSETGPVAVDPTLRRRIEPHEFEVFFDPRELRKETCLLYEINWGGRHSIWRH
TSQNTNKHVEVNFIEKFTTERYFCPNTRCSITWFLSYSPCGECSRAITEFLSRYPHVTLFIY
IARLYHHADPENRQGLRDLISSGVTIQIMTEQESGYCWRNFVNYSPSNEAHWPRYPHLW
VRLYVLELYCIILGLPPCLNILRRKQPQLTFFTIALQSCHYQRLPPHILWATGLK
YE2
(SEQ ID NO: 43)
MSSETGPVAVDPTLRRRIEPHEFEVFFDPRELRKETCLLYEINWGGRHSIWRH
TSQNTNKHVEVNFIEKFTTERYFCPNTRCSITWFLSYSPCGECSRAITEFLSRYPHVTLFIY
IARLYHHADPRNRQGLEDLISSGVTIQIMTEQESGYCWRNFVNYSPSNEAHWPRYPHLW
VRLYVLELYCIILGLPPCLNILRRKQPQLTFFTIALQSCHYQRLPPHILWATGLK
YEE
(SEQ ID NO: 44)
MSSETGPVAVDPTLRRRIEPHEFEVFFDPRELRKETCLLYEINWGGRHSIWRH
TSQNTNKHVEVNFIEKFTTERYFCPNTRCSITWFLSYSPCGECSRAITEFLSRYPHVTLFIY
IARLYHHADPENRQGLEDLISSGVTIQIMTEQESGYCWRNFVNYSPSNEAHWPRYPHLW
VRLYVLELYCIILGLPPCLNILRRKQPQLTFFTIALQSCHYQRLPPHILWATGLK
EE
(SEQ ID NO: 45)
MSSETGPVAVDPTLRRRIEPHEFEVFFDPRELRKETCLLYEINWGGRHSIWRH
TSQNTNKHVEVNFIEKFTTERYFCPNTRCSITWFLSWSPCGECSRAITEFLSRYPHVTLFIY
IARLYHHADPENRQGLEDLISSGVTIQIMTEQESGYCWRNFVNYSPSNEAHWPRYPHLW
VRLYVLELYCIILGLPPCLNILRRKQPQLTFFTIALQSCHYQRLPPHILWATGLK
R33A
(SEQ ID NO: 46)
MSSETGPVAVDPTLRRRIEPHEFEVFFDPRELAKETCLLYEINWGGRHSIWRH
TSQNTNKHVEVNFIEKFTTERYFCPNTRCSITWFLSWSPCGECSRAITEFLSRYPHVTLFIY
IARLYHHADPRNRQGLRDLISSGVTIQIMTEQESGYCWRNFVNYSPSNEAHWPRYPHLW
VRLYVLELYCIILGLPPCLNILRRKQPQLTFFTIALQSCHYQRLPPHILWATGLK
R33A + K34A
(SEQ ID NO: 47)
MSSETGPVAVDPTLRRRIEPHEFEVFFDPRELAAETCLLYEINWGGRHSIWRH
TSQNTNKHVEVNFIEKFTTERYFCPNTRCSITWFLSWSPCGECSRAITEFLSRYPHVTLFIY
IARLYHHADPRNRQGLRDLISSGVTIQIMTEQESGYCWRNFVNYSPSNEAHWPRYPHLW
VRLYVLELYCIILGLPPCLNILRRKQPQLTFFTIALQSCHYQRLPPHILWATGLK
AALN
(SEQ ID NO: 48)
MSSETGPVAVDPTLRRRIEPHEFEVFFDPRELAAETCLLYEINWGGRHSIWRH
TSQNTNKHVEVNFIEKFTTERYFCPNTRCSITWFLSWSPCGECSRAITEFLSRYPHVTLFIY
IARLYHLANPRNRQGLRDLISSGVTIQIMTEQESGYCWRNFVNYSPSNEAHWPRYPHLW
VRLYVLELYCIILGLPPCLNILRRKQPQLTFFTIALQSCHYQRLPPHILWATGLK
FERNY
(SEQ ID NO: 49)
MFERNYDPRELRKETYLLYEIKWGKSGKLWRHWCQNNRTQHAEVYFLENIF
NARRENPSTHCSITWYLSWSPCAECSQKIVDFLKEHPNVNLEIYVARLYYHEDERNRQG
LRDLVNSGVTIRIMDLPDYNYCWKTFVSDQGGDEDYWPGHFAPWIKQYSLKL
evo FERNY
(SEQ ID NO: 50)
MFERNYDPRELRKETYLLYEIKWGKSGKLWRHWCQNNRTQHAEVYFLENIF
NARRFNPSTHCSITWYLSWSPCAECSQKIVDFLKEHPNVNLEIYVARLYYPENERNRQG
LRDLVNSGVTIRIMDLPDYNYCWKTFVSDQGGDEDYWPGHFAPWIKQYSLKL

[0152] In some embodiments, a base editor fusion protein converts an A to G. In some embodiments, the base editor comprises an adenosine deaminase. An “adenosine deaminase” is an enzyme involved in purine metabolism. It is needed for the breakdown of adenosine from food and for the turnover of nucleic acids in tissues. Its primary function in humans is the development and maintenance of the immune system. An adenosine deaminase catalyzes hydrolytic deamination of adenosine (forming inosine, which base pairs as G) in the context of DNA. There are no known adenosine deaminases that act on DNA. Instead, known adenosine deaminase enzymes only act on RNA (tRNA or mRNA). Evolved deoxyadenosine deaminase enzymes that accept DNA substrates and deaminate dA to deoxyinosine for use in adenosine nucleobase editors have been described, e.g., in PCT Application PCT/US2017/045381, filed Aug. 3, 2017, which published as WO 2018/027078, PCT Application No. PCT/US2019/033848, which published as WO 2019/226953 on May 23, 2019, PCT Application No PCT/US2019/033848, filed May 23, 2019, and PCT Application No. PCT/US2020/028568, filed Apr. 17, 2020; each of which is herein incorporated by reference. Non-limiting examples of evolved adenosine deaminases that accept DNA as substrates are provided below. In some embodiments, an adenosine deaminase comprises any of the following amino acid sequences, or an amino acid sequence at least 70%, at least 75%, at least 80%, at least 85%, at least 90%, at least 95%, at least 99%, or at least 99.9% identical to any of the following amino acid sequences (SEQ ID NOs: 51-118):

ecTadA
(SEQ ID NO: 51)
SEVEFSHEYWMRHALTLAKRAWDEREVPVGAVLVHNNRVIGEGWNRPIGR
HDPTAHAEIMALRQGGLVMQNYRLIDATLYVTLEPCVMCAGAMIHSRIGRVVFGARDA
KTGAAGSLMDVLHHPGMNHRVEITEGILADECAALLSDFFRMRRQEIKAQKKAQSSTD
ecTadA (D108N)
(SEQ ID NO: 52)
SEVEFSHEYWMRHALTLAKRAWDEREVPVGAVLVHNNRVIGEGWNRPIGR
HDPTAHAEIMALRQGGLVMQNYRLIDATLYVTLEPCVMCAGAMIHSRIGRVVFGARNA
KTGAAGSLMDVLHHPGMNHRVEITEGILADECAALLSDFFRMRRQEIKAQKKAQSSTD
ecTadA (D108G)
(SEQ ID NO: 53)
SEVEFSHEYWMRHALTLAKRAWDEREVPVGAVLVHNNRVIGEGWNRPIGR
HDPTAHAEIMALRQGGLVMQNYRLIDATLYVTLEPCVMCAGAMIHSRIGRVVFGARGA
KTGAAGSLMDVLHHPGMNHRVEITEGILADECAALLSDFFRMRRQEIKAQKKAQSSTD
ecTadA (D108V)
(SEQ ID NO: 54)
SEVEFSHEYWMRHALTLAKRAWDEREVPVGAVLVHNNRVIGEGWNRPIGR
HDPTAHAEIMALRQGGLVMQNYRLIDATLYVTLEPCVMCAGAMIHSRIGRVVFGARVA
KTGAAGSLMDVLHHPGMNHRVEITEGILADECAALLSDFFRMRRQEIKAQKKAQSSTD
ecTadA (H8Y, D108N, N127S)
(SEQ ID NO: 55)
SEVEFSYEYWMRHALTLAKRAWDEREVPVGAVLVHNNRVIGEGWNRPIGR
HDPTAHAEIMALRQGGLVMQNYRLIDATLYVTLEPCVMCAGAMIHSRIGRVVFGARNA
KTGAAGSLMDVLHHPGMSHRVEITEGILADECAALLSDFFRMRRQEIKAQKKAQSSTD
ecTadA (H8Y, D108N, N127S, E155D)
(SEQ ID NO: 56)
SEVEFSYEYWMRHALTLAKRAWDEREVPVGAVLVHNNRVIGEGWNRPIGR
HDPTAHAEIMALRQGGLVMQNYRLIDATLYVTLEPCVMCAGAMIHSRIGRVVFGARNA
KTGAAGSLMDVLHHPGMSHRVEITEGILADECAALLSDFFRMRRQDIKAQKKAQSSTD
ecTadA (H8Y, D108N, N127S, E155G)
(SEQ ID NO: 57)
SEVEFSYEYWMRHALTLAKRAWDEREVPVGAVLVHNNRVIGEGWNRPIGR
HDPTAHAEIMALRQGGLVMQNYRLIDATLYVTLEPCVMCAGAMIHSRIGRVVFGARNA
KTGAAGSLMDVLHHPGMSHRVEITEGILADECAALLSDFFRMRRQGIKAQKKAQSSTD
ecTadA (H8Y, D108N, N127S, E155V)
(SEQ ID NO: 58)
SEVEFSYEYWMRHALTLAKRAWDEREVPVGAVLVHNNRVIGEGWNRPIGR
HDPTAHAEIMALRQGGLVMQNYRLIDATLYVTLEPCVMCAGAMIHSRIGRVVFGARNA
KTGAAGSLMDVLHHPGMSHRVEITEGILADECAALLSDFFRMRRQVIKAQKKAQSSTD
ecTadA (A106V, D108N, D147Y, and E155V)
(SEQ ID NO: 59)
SEVEFSHEYWMRHALTLAKRAWDEREVPVGAVLVHNNRVIGEGWNRPIGR
HDPTAHAEIMALRQGGLVMQNYRLIDATLYVTLEPCVMCAGAMIHSRIGRVVFGVRNA
KTGAAGSLMDVLHHPGMNHRVEITEGILADECAALLSYFFRMRRQVIKAQKKAQSSTD
ecTadA (S2A, I49F, A106V, D108N, D147Y, E155V)
(SEQ ID NO: 60)
AEVEFSHEYWMRHALTLAKRAWDEREVPVGAVLVHNNRVIGEGWNRPFGR
HDPTAHAEIMALRQGGLVMQNYRLIDATLYVTLEPCVMCAGAMIHSRIGRVVFGVRNA
KTGAAGSLMDVLHHPGMNHRVEITEGILADECAALLSYFFRMRRQVIKAQKKAQSSTD
ecTadA (H8Y, A106T, D108N, N127S, K160S)
(SEQ ID NO: 61)
SEVEFSYEYWMRHALTLAKRAWDEREVPVGAVLVHNNRVIGEGWNRPIGR
HDPTAHAEIMALRQGGLVMQNYRLIDATLYVTLEPCVMCAGAMIHSRIGRVVFGTRNA
KTGAAGSLMDVLHHPGMSHRVEITEGILADECAALLSDFFRMRRQEIKAQSKAQSSTD
ecTadA (R26G, L84F, A106V, R107H, D108N, H123Y, A142N, A143D, D147Y,
E155V, I156F)
(SEQ ID NO: 62)
SEVEFSHEYWMRHALTLAKRAWDEGEVPVGAVLVHNNRVIGEGWNRPIGR
HDPTAHAEIMALRQGGLVMQNYRLIDATLYVTFEPCVMCAGAMIHSRIGRVVFGVHNA
KTGAAGSLMDVLHYPGMNHRVEITEGILADECNDLLSYFFRMRRQVFKAQKKAQSSTD
ecTadA (E25G, R26G, L84F, A106V, R107H, D108N, H123Y, A142N, A143D,
D147Y, E155V, I156F)
(SEQ ID NO: 63)
SEVEFSHEYWMRHALTLAKRAWDGGEVPVGAVLVHNNRVIGEGWNRPIGR
HDPTAHAEIMALRQGGLVMQNYRLIDATLYVTFEPCVMCAGAMIHSRIGRVVFGVHNA
KTGAAGSLMDVLHYPGMNHRVEITEGILADECNDLLSYFFRMRRQVFKAQKKAQSSTD
ecTadA (E25D, R26G, L84F, A106V, R107K, D108N, H123Y, A142N, A143G,
D147Y, E155V, I156F)
(SEQ ID NO: 64)
SEVEFSHEYWMRHALTLAKRAWDDGEVPVGAVLVHNNRVIGEGWNRPIGR
HDPTAHAEIMALRQGGLVMQNYRLIDATLYVTFEPCVMCAGAMIHSRIGRVVFGVKNA
KTGAAGSLMDVLHYPGMNHRVEITEGILADECNGLLSYFFRMRRQVFKAQKKAQSSTD
ecTadA (R26Q, L84F, A106V, D108N, H123Y, A142N, D147Y, E155V, I156F)
(SEQ ID NO: 65)
SEVEFSHEYWMRHALTLAKRAWDEQEVPVGAVLVHNNRVIGEGWNRPIGR
HDPTAHAEIMALRQGGLVMQNYRLIDATLYVTFEPCVMCAGAMIHSRIGRVVFGVRNA
KTGAAGSLMDVLHYPGMNHRVEITEGILADECNALLSYFFRMRRQVFKAQKKAQSSTD
ecTadA (E25M, R26G, L84F, A106V, R107P, D108N, H123Y, A142N, A143D,
D147Y, E155V, I156F)
(SEQ ID NO: 66)
SEVEFSHEYWMRHALTLAKRAWDMGEVPVGAVLVHNNRVIGEGWNRPIGR
HDPTAHAEIMALRQGGLVMQNYRLIDATLYVTFEPCVMCAGAMIHSRIGRVVFGVPNA
KTGAAGSLMDVLHYPGMNHRVEITEGILADECNDLLSYFFRMRRQVFKAQKKAQSSTD
ecTadA (R26C, L84F, A106V, R107H, D108N, H123Y, A142N, D147Y, E155V,
I156F)
(SEQ ID NO: 67)
SEVEFSHEYWMRHALTLAKRAWDECEVPVGAVLVHNNRVIGEGWNRPIGR
HDPTAHAEIMALRQGGLVMQNYRLIDATLYVTFEPCVMCAGAMIHSRIGRVVFGVHNA
KTGAAGSLMDVLHYPGMNHRVEITEGILADECNALLSYFFRMRRQVFKAQKKAQSSTD
ecTadA (L84F, A106V, D108N, H123Y, A142N, A143L, D147Y, E155V, I156F)
(SEQ ID NO: 68)
SEVEFSHEYWMRHALTLAKRAWDEREVPVGAVLVHNNRVIGEGWNRPIGR
HDPTAHAEIMALRQGGLVMQNYRLIDATLYVTFEPCVMCAGAMIHSRIGRVVFGVRNA
KTGAAGSLMDVLHYPGMNHRVEITEGILADECNLLLSYFFRMRRQVFKAQKKAQSSTD
ecTadA (R26G, L84F, A106V, D108N, H123Y, A142N, D147Y, E155V, I156F)
(SEQ ID NO: 69)
SEVEFSHEYWMRHALTLAKRAWDEGEVPVGAVLVHNNRVIGEGWNRPIGR
HDPTAHAEIMALRQGGLVMQNYRLIDATLYVTFEPCVMCAGAMIHSRIGRVVFGVRNA
KTGAAGSLMDVLHYPGMNHRVEITEGILADECNALLSYFFRMRRQVFKAQKKAQSSTD
ecTadA (R51H, L84F, A106V, D108N, H123Y, D147Y, E155V, 1156F, K157N)
(SEQ ID NO: 70)
SEVEFSHEYWMRHALTLAKRAWDEREVPVGAVLVHNNRVIGEGWNRPIGH
HDPTAHAEIMALRQGGLVMQNYRLIDATLYVTFEPCVMCAGAMIHSRIGRVVFGVRNA
KTGAAGSLMDVLHYPGMNHRVEITEGILADECAALLSYFFRMRRQVFNAQKKAQSSTD
ecTadA (E25A, R26G, L84F, A106V, R107N, D108N, H123Y, A142N, A143E,
D147Y, E155V, I156F)
(SEQ ID NO: 71)
SEVEFSHEYWMRHALTLAKRAWDAGEVPVGAVLVHNNRVIGEGWNRPIGR
HDPTAHAEIMALRQGGLVMQNYRLIDATLYVTFEPCVMCAGAMIHSRIGRVVFGVNNA
KTGAAGSLMDVLHYPGMNHRVEITEGILADECNELLSYFFRMRRQVFKAQKKAQSSTD
ecTadA (N37T, P48T, L84F, A106V, D108N, H123Y, D147Y, E155V, I156F)
(SEQ ID NO: 72)
SEVEFSHEYWMRHALTLAKRAWDEREVPVGAVLVHTNRVIGEGWNRTIGR
HDPTAHAEIMALRQGGLVMQNYRLIDATLYVTFEPCVMCAGAMIHSRIGRVVFGVRNA
KTGAAGSLMDVLHYPGMNHRVEITEGILADECAALLSYFFRMRRQVFKAQKKAQSSTD
ecTadA (N37S, L84F, A106V, D108N, H123Y, D147Y, E155V, 1156F)
(SEQ ID NO: 73)
SEVEFSHEYWMRHALTLAKRAWDEREVPVGAVLVHSNRVIGEGWNRPIGRH
DPTAHAEIMALRQGGLVMQNYRLIDATLYVTFEPCVMCAGAMIHSRIGRVVFGVRNAK
TGAAGSLMDVLHYPGMNHRVEITEGILADECAALLSYFFRMRRQVFKAQKKAQSSTD
ecTadA (H36L, L84F, A106V, D108N, H123Y, D147Y, E155V, 1156F)
(SEQ ID NO: 74)
SEVEFSHEYWMRHALTLAKRAWDEREVPVGAVLVLNNRVIGEGWNRPIGRH
DPTAHAEIMALRQGGLVMQNYRLIDATLYVTFEPCVMCAGAMIHSRIGRVVFGVRNAK
TGAAGSLMDVLHYPGMNHRVEITEGILADECAALLSYFFRMRRQVFKAQKKAQSSTD
ecTadA (H36L, P48L, L84F, A106V, D108N, H123Y, D147Y, E155V, 1156F)
(SEQ ID NO: 75)
SEVEFSHEYWMRHALTLAKRAWDEREVPVGAVLVLNNRVIGEGWNRLIGR
HDPTAHAEIMALRQGGLVMQNYRLIDATLYVTFEPCVMCAGAMIHSRIGRVVFGVRNA
KTGAAGSLMDVLHYPGMNHRVEITEGILADECAALLSYFFRMRRQVFKAQKKAQSSTD
ecTadA (H36L, L84F, A106V, D108N, H123Y, D147Y, E155V, K57N, I156F)
(SEQ ID NO: 76)
SEVEFSHEYWMRHALTLAKRAWDEREVPVGAVLVLNNRVIGEGWNRPIGRH
DPTAHAEIMALRQGGLVMQNYRLIDATLYVTFEPCVMCAGAMIHSRIGRVVFGVRNAK
TGAAGSLMDVLHYPGMNHRVEITEGILADECAALLSYFFRMRRQVFNAQKKAQSSTD
ecTadA (H36L, L84F, A106V, D108N, H123Y, S146C, D147Y, E155V, I156F)
(SEQ ID NO: 77)
SEVEFSHEYWMRHALTLAKRAWDEREVPVGAVLVLNNRVIGEGWNRPIGRH
DPTAHAEIMALRQGGLVMQNYRLIDATLYVTFEPCVMCAGAMIHSRIGRVVFGVRNAK
TGAAGSLMDVLHYPGMNHRVEITEGILADECAALLCYFFRMRRQVFKAQKKAQSSTD
ecTadA (L84F, A106V, D108N, H123Y, S146R, D147Y, E155V, I156F)
(SEQ ID NO: 78)
SEVEFSHEYWMRHALTLAKRAWDEREVPVGAVLVHNNRVIGEGWNRPIGR
HDPTAHAEIMALRQGGLVMQNYRLIDATLYVTFEPCVMCAGAMIHSRIGRVVFGVRNA
KTGAAGSLMDVLHYPGMNHRVEITEGILADECAALLRYFFRMRRQVFKAQKKAQSSTD
ecTadA (N37S, R51H, L84F, A106V, D108N, H123Y, D147Y, E155V, I156F
(SEQ ID NO: 79)
SEVEFSHEYWMRHALTLAKRAWDEREVPVGAVLVHSNRVIGEGWNRPIGHH
DPTAHAEIMALRQGGLVMQNYRLIDATLYVTFEPCVMCAGAMIHSRIGRVVFGVRNAK
TGAAGSLMDVLHYPGMNHRVEITEGILADECAALLSYFFRMRRQVFKAQKKAQSSTD
ecTadA (R51L, L84F, A106V, D108N, H123Y, D147Y, E155V, I156F, K157N
(SEQ ID NO: 80)
SEVEFSHEYWMRHALTLAKRAWDEREVPVGAVLVHNNRVIGEGWNRPIGL
HDPTAHAEIMALRQGGLVMQNYRLIDATLYVTFEPCVMCAGAMIHSRIGRVVFGVRNA
KTGAAGSLMDVLHYPGMNHRVEITEGILADECAALLSYFFRMRRQVFNAQKKAQSSTD
saTadA (D108N)
(SEQ ID NO: 81)
GSHMTNDIYFMTLAIEEAKKAAQLGEVPIGAIITKDDEVIARAHNLRETLQQP
TAHAEHIAIERAAKVLGSWRLEGCTLYVTLEPCVMCAGTIVMSRIPRVVYGADNPKGGC
SGSLMNLLQQSNFNHRAIVDKGVLKEACSTLLTTFFKNLRANKKSTN
saTadA (D107A_D108N)
(SEQ ID NO: 82)
GSHMTNDIYFMTLAIEEAKKAAQLGEVPIGAIITKDDEVIARAHNLRETLQQP
TAHAEHIAIERAAKVLGSWRLEGCTLYVTLEPCVMCAGTIVMSRIPRVVYGAANPKGGC
SGSLMNLLQQSNFNHRAIVDKGVLKEACSTLLTTFFKNLRANKKSTN
saTadA (G26P_D107A_D108N)
(SEQ ID NO: 83)
GSHMTNDIYFMTLAIEEAKKAAQLPEVPIGAIITKDDEVIARAHNLRETLQQPT
AHAEHIAIERAAKVLGSWRLEGCTLYVTLEPCVMCAGTIVMSRIPRVVYGAANPKGGCS
GSLMNLLQQSNFNHRAIVDKGVLKEACSTLLTTFFKNLRANKKSTN
saTadA (G26P_D107A_D108N_S142A)
(SEQ ID NO: 84)
GSHMTNDIYFMTLAIEEAKKAAQLPEVPIGAIITKDDEVIARAHNLRETLQQPT
AHAEHIAIERAAKVLGSWRLEGCTLYVTLEPCVMCAGTIVMSRIPRVVYGAANPKGGCS
GSLMNLLQQSNFNHRAIVDKGVLKEACATLLTTFFKNLRANKKSTN
saTadA (D107A_D108N_S142A)
(SEQ ID NO: 85)
GSHMTNDIYFMTLAIEEAKKAAQLGEVPIGAIITKDDEVIARAHNLRETLQQP
TAHAEHIAIERAAKVLGSWRLEGCTLYVTLEPCVMCAGTIVMSRIPRVVYGAANPKGGC
SGSLMNLLQQSNFNHRAIVDKGVLKEACATLLTTFFKNLRANKKSTN
ecTadA (P48S)
(SEQ ID NO: 86)
SEVEFSHEYWMRHALTLAKRAWDEREVPVGAVLVHNNRVIGEGWNRSIGR
HDPTAHAEIMALRQGGLVMQNYRLIDATLYVTLEPCVMCAGAMIHSRIGRVVFGARDA
KTGAAGSLMDVLHHPGMNHRVEITEGILADECAALLSDFFRMRRQEIKAQKKAQSSTD
ecTadA (P48T)
(SEQ ID NO: 87)
SEVEFSHEYWMRHALTLAKRAWDEREVPVGAVLVHNNRVIGEGWNRTIGR
HDPTAHAEIMALRQGGLVMQNYRLIDATLYVTLEPCVMCAGAMIHSRIGRVVFGARDA
KTGAAGSLMDVLHHPGMNHRVEITEGILADECAALLSDFFRMRRQEIKAQKKAQSSTD
ecTadA (P48A)
(SEQ ID NO: 88)
SEVEFSHEYWMRHALTLAKRAWDEREVPVGAVLVHNNRVIGEGWNRAIGR
HDPTAHAEIMALRQGGLVMQNYRLIDATLYVTLEPCVMCAGAMIHSRIGRVVFGARDA
KTGAAGSLMDVLHHPGMNHRVEITEGILADECAALLSDFFRMRRQEIKAQKKAQSSTD
ecTadA (A142N)
(SEQ ID NO: 89)
SEVEFSHEYWMRHALTLAKRAWDEREVPVGAVLVHNNRVIGEGWNRPIGR
HDPTAHAEIMALRQGGLVMQNYRLIDATLYVTLEPCVMCAGAMIHSRIGRVVFGARDA
KTGAAGSLMDVLHHPGMNHRVEITEGILADECNALLSDFFRMRRQEIKAQKKAQSSTD
ecTadA (W23R)
(SEQ ID NO: 90)
SEVEFSHEYWMRHALTLAKRARDEREVPVGAVLVHNNRVIGEGWNRPIGRH
DPTAHAEIMALRQGGLVMQNYRLIDATLYVTLEPCVMCAGAMIHSRIGRVVFGARDAK
TGAAGSLMDVLHHPGMNHRVEITEGILADECAALLSDFFRMRRQEIKAQKKAQSSTD
ecTadA (W23L)
(SEQ ID NO: 91)
SEVEFSHEYWMRHALTLAKRALDEREVPVGAVLVHNNRVIGEGWNRPIGRH
DPTAHAEIMALRQGGLVMQNYRLIDATLYVTLEPCVMCAGAMIHSRIGRVVFGARDAK
TGAAGSLMDVLHHPGMNHRVEITEGILADECAALLSDFFRMRRQEIKAQKKAQSSTD
ecTadA (R152P)
(SEQ ID NO: 92)
SEVEFSHEYWMRHALTLAKRAWDEREVPVGAVLVHNNRVIGEGWNRPIGR
HDPTAHAEIMALRQGGLVMQNYRLIDATLYVTLEPCVMCAGAMIHSRIGRVVFGARDA
KTGAAGSLMDVLHHPGMNHRVEITEGILADECAALLSDFFRMPRQEIKAQKKAQSSTD
ecTadA (R152H)
(SEQ ID NO: 93)
SEVEFSHEYWMRHALTLAKRAWDEREVPVGAVLVHNNRVIGEGWNRPIGR
HDPTAHAEIMALRQGGLVMQNYRLIDATLYVTLEPCVMCAGAMIHSRIGRVVFGARDA
KTGAAGSLMDVLHHPGMNHRVEITEGILADECAALLSDFFRMHRQEIKAQKKAQSSTD
ecTadA (L84F, A106V, D108N, H123Y, D147Y, E155V, 1156F)
(SEQ ID NO: 94)
SEVEFSHEYWMRHALTLAKRAWDEREVPVGAVLVHNNRVIGEGWNRPIGR
HDPTAHAEIMALRQGGLVMQNYRLIDATLYVTFEPCVMCAGAMIHSRIGRVVFGVRNA
KTGAAGSLMDVLHYPGMNHRVEITEGILADECAALLSYFFRMRRQVFKAQKKAQSSTD
ecTadA (H36L, R51L, L84F, A106V, D108N, H123Y, S146C, D147Y, E155V,
I156F, K157N)
(SEQ ID NO: 95)
SEVEFSHEYWMRHALTLAKRAWDEREVPVGAVLVLNNRVIGEGWNRPIGLH
DPTAHAEIMALRQGGLVMQNYRLIDATLYVTFEPCVMCAGAMIHSRIGRVVFGVRNAK
TGAAGSLMDVLHYPGMNHRVEITEGILADECAALLCYFFRMRRQVFNAQKKAQSSTD
ecTadA (H36L, P48S, R51L, L84F, A106V, D108N, H123Y, S146C, D147Y,
E155V, I156F, K157N)
(SEQ ID NO: 96)
SEVEFSHEYWMRHALTLAKRAWDEREVPVGAVLVLNNRVIGEGWNRSIGLH
DPTAHAEIMALRQGGLVMQNYRLIDATLYVTFEPCVMCAGAMIHSRIGRVVFGVRNAK
TGAAGSLMDVLHYPGMNHRVEITEGILADECAALLCYFFRMRRQVFNAQKKAQSSTD
ecTadA (H36L, P48A, R51L, L84F, A106V, D108N, H123Y, S146C, D147Y,
E155V, I156F, K157N)
(SEQ ID NO: 97)
SEVEFSHEYWMRHALTLAKRAWDEREVPVGAVLVLNNRVIGEGWNRAIGL
HDPTAHAEIMALRQGGLVMQNYRLIDATLYVTFEPCVMCAGAMIHSRIGRVVFGVRNA
KTGAAGSLMDVLHYPGMNHRVEITEGILADECAALLCYFFRMRRQVFNAQKKAQSSTD
ecTadA (W23L, H36L, P48A, R51L, L84F, A106V, D108N, H123Y, S146C,
D147Y, R152P, E155V, I156F, K157N)
(SEQ ID NO: 98)
SEVEFSHEYWMRHALTLAKRALDEREVPVGAVLVLNNRVIGEGWNRAIGLH
DPTAHAEIMALRQGGLVMQNYRLIDATLYVTFEPCVMCAGAMIHSRIGRVVFGVRNAK
TGAAGSLMDVLHYPGMNHRVEITEGILADECAALLCYFFRMPRQVFNAQKKAQSSTD
ecTadA (W23R, H36L, P48A, R51L, L84F, A106V, D108N, H123Y, S146C,
D147Y, R152P, E155V, I156F, K157N)
(SEQ ID NO: 99)
SEVEFSHEYWMRHALTLAKRARDEREVPVGAVLVLNNRVIGEGWNRAIGLH
DPTAHAEIMALRQGGLVMQNYRLIDATLYVTFEPCVMCAGAMIHSRIGRVVFGVRNAK
TGAAGSLMDVLHYPGMNHRVEITEGILADECAALLCYFFRMPRQVFNAQKKAQSSTD
Staphylococcus aureus TadA:
(SEQ ID NO: 100)
MGSHMTNDIYFMTLAIEEAKKAAQLGEVPIGAIITKDDEVIARAHNLRETLQQ
PTAHAEHIAIERAAKVLGSWRLEGCTLYVTLEPCVMCAGTIVMSRIPRVVYGADDPKGG
CSGSLMNLLQQSNFNHRAIVDKGVLKEACSTLLTTFFKNLRANKKSTN
Bacillus subtilis TadA:
(SEQ ID NO: 101)
MTQDELYMKEAIKEAKKAEEKGEVPIGAVLVINGEIIARAHNLRETEQRSIAH
AEMLVIDEACKALGTWRLEGATLYVTLEPCPMCAGAVVLSRVEKVVFGAFDPKGGCS
GTLMNLLQEERFNHQAEVVSGVLEEECGGMLSAFFRELRKKKKAARKNLSE
Salmonella typhimurium (S. typhimurium) TadA:
(SEQ ID NO: 102)
MPPAFITGVTSLSDVELDHEYWMRHALTLAKRAWDEREVPVGAVLVHNHR
VIGEGWNRPIGRHDPTAHAEIMALRQGGLVLQNYRLLDTTLYVTLEPCVMCAGAMVHS
RIGRVVFGARDAKTGAAGSLIDVLHHPGMNHRVEIIEGVLRDECATLLSDFFRMRRQEI
KALKKADRAEGAGPAV
Shewanella putrefaciens (S. putrefaciens) TadA:
(SEQ ID NO: 103)
MDEYWMQVAMQMAEKAEAAGEVPVGAVLVKDGQQIATGYNLSISQHDPT
AHAEILCLRSAGKKLENYRLLDATLYITLEPCAMCAGAMVHSRIARVVYGARDEKTGA
AGTVVNLLQHPAFNHQVEVTSGVLAEACSAQLSRFFKRRRDEKKALKLAQRAQQGIE
Haemophilus influenzae F3031 (H. influenzae) TadA:
(SEQ ID NO: 104)
MDAAKVRSEFDEKMMRYALELADKAEALGEIPVGAVLVDDARNIIGEGWNL
SIVQSDPTAHAEIIALRNGAKNIQNYRLLNSTLYVTLEPCTMCAGAILHSRIKRLVFGASD
YKTGAIGSRFHFFDDYKMNHTLEITSGVLAEECSQKLSTFFQKRREEKKIEKALLKSLSD
K
Caulobacter crescentus (C. crescentus) TadA:
(SEQ ID NO: 105)
MRTDESEDQDHRMMRLALDAARAAAEAGETPVGAVILDPSTGEVIATAGNG
PIAAHDPTAHAEIAAMRAAAAKLGNYRLTDLTLVVTLEPCAMCAGAISHARIGRVVFGA
DDPKGGAVVHGPKFFAQPTCHWRPEVTGGVLADESADLLRGFFRARRKAKI
Geobacter sulfurreducens (G. sulfurreducens) TadA:
(SEQ ID NO: 106)
MSSLKKTPIRDDAYWMGKAIREAAKAAARDEVPIGAVIVRDGAVIGRGHNL
REGSNDPSAHAEMIAIRQAARRSANWRLTGATLYVTLEPCLMCMGAIILARLERVVFGC
YDPKGGAAGSLYDLSADPRLNHQVRLSPGVCQEECGTMLSDFFRDLRRRKKAKATPAL
FIDERKVPPEP
Streptococcus pyogenes (S. pyogenes) TadA
(SEQ ID NO: 107
MPYSLEEQTYFMQEALKEAEKSLQKAEIPIGCVIVKDGEIIGRGHNAREESNQ
AIMHAEIMAINEANAHEGNWRLLDTTLFVTIEPCVMCSGAIGLARIPHVIYGASNQKFGG
ADSLYQILTDERLNHRVQVERGLLAADCANIMQTFFRQGRERKKIAKHLIKEQSDPFD
TadA 7.10:
(SEQ ID NO: 108)
SEVEFSHEYWMRHALTLAKRARDEREVPVGAVLVLNNRVIGEGWNRAIGLH
DPTAHAEIMALRQGGLVMQNYRLIDATLYVTFEPCVMCAGAMIHSRIGRVVFGVRNAK
TGAAGSLMDVLHYPGMNHRVEITEGILADECAALLCYFFRMPRQVFNAQKKAQSSTD
TadA 7.10 (V106W) (E. coli)
(SEQ ID NO: 109)
SEVEFSHEYWMRHALTLAKRARDEREVPVGAVLVLNNRVIGEGWNRAIGLH
DPTAHAEIMALRQGGLVMQNYRLIDATLYVTFEPCVMCAGAMIHSRIGRVVFGWRNA
KTGAAGSLMDVLHYPGMNHRVEITEGILADECAALLCYFFRMPRQVFNAQKKAQSSTD
TadA-8e (E. coli)
(SEQ ID NO: 110)
SEVEFSHEYWMRHALTLAKRARDEREVPVGAVLVLNNRVIGEGWNRAIGLH
DPTAHAEIMALRQGGLVMQNYRLIDATLYVTFEPCVMCAGAMIHSRIGRVVFGVRNSK
RGAAGSLMNVLNYPGMNHRVEITEGILADECAALLCDFYRMPRQVFNAQKKAQSSIN
TadA-8e(V106W) (E. coli)
(SEQ ID NO: 111)
SEVEFSHEYWMRHALTLAKRARDEREVPVGAVLVLNNRVIGEGWNRAIGLH
DPTAHAEIMALRQGGLVMQNYRLIDATLYVTFEPCVMCAGAMIHSRIGRVVFGWRNSK
RGAAGSLMNVLNYPGMNHRVEITEGILADECAALLCDFYRMPRQVFNAQKKAQSSIN
Aquifex aeolicus (A. aeolicus) TadA
(SEQ ID NO: 112)
MGKEYFLKVALREAKRAFEKGEVPVGAIIVKEGEIISKAHNSVEELKDPTAHA
EMLAIKEACRRLNTKYLEGCELYVTLEPCIMCSYALVLSRIEKVIFSALDKKHGGVVSVF
NILDEPTLNHRVKWEYYPLEEASELLSEFFKKLRNNII
Tad1
(SEQ ID NO: 113)
SEVEFSHEYWMRHALTLAKRARDEGEVPVGAVLVLNNRVIGEGWNRAIGLY
DPTAHAEIMALRQGGLVMQNYRLIDATLYVTFEPCVMCAGAMIHSRIGRVVFGVRNSK
RGAAGSLMNVLNYPGMDHRVEITEGILADECAALLCDFYRMPRQVFNAQKKAQSSIN
Tad2
(SEQ ID NO: 114)
SEVEFSHEYWMRHALTLAKRARDEGEVPVGAVLVLNNRVIGEGWNRAIGLH
DPTAHAEIMALRQGGLVMQNYRLIDATLYVTFEPCVMCAGAMIHSRIGRVVFGVRNSK
RGAAGSLMNVLNYPGMDHRVEITEGILADECAALLCDFYRMPRQVFNAQKKAQSSIN
Tad3
(SEQ ID NO: 115)
SEVEFSHEYWMRHALTLAKRARDEREVPVGAVLVLNNRVIGEGWNRAIGLH
DPTAHAEIMALRQGGLVMQNYGLIDATLYVTFEPCVMCAGAIIHSRIGRVVFGVRNSKR
GAAGSLMNVLNYPGMNHRVEITEGILADECAALLCDFYRMPRQVFNAQKKAQSSIN
Tad4
(SEQ ID NO: 116)
SEVEFSHEYWMRHALTLAKRARDEREVPVGAVLVLNNRVIGEGWNRAIGLH
DPTAHAEIMALRQGGLVMQNYRLIDATLYVTFEPCVMCAGAMIHSRIGRVVFGVRNSK
RGAAGSLMNVLNYPGMDHRVEITEGILADECAALLCDFYRMPRQVFNAQKKAQSSIN
Tad6
(SEQ ID NO: 117)
SEVEFSHEYWMRHALTLAKRARDEGEVPVGAVLVLNNRVIGEGWNRAIGLY
DPTAHAEIMALRQGGLVMQNYGLIDATLYVTFEPCVMCAGAMIHSRIGRVVFGVRNSK
RGAAGSLMNVLNYPGMDHRVEITEGILADECAALLCDFYRMPRQVFNAQKKAQSSIN
Tad6-SR
(SEQ ID NO: 118)
SEVEFSHEYWMRHALTLAKRARDEGEVPVGAVLVLNNRVIGEGWNRAIGLY
DPTAHAEIMALRQGGLVMQNYGLIDATLYSTFEPCVMCAGAMIHSRIGRVVFGVRNSK
RGAAGSLMNVLNYPGMDHRVEITEGILADECAALLCDFYRMPRRVFNAQKKAQSSIN

[0153] In some aspects, the fusion proteins of the present disclosure comprise cytidine base editors (CBEs) comprising a napDNAbp domain (e.g., any of the Cas14a1 variants provided herein) and a cytosine deaminase domain that enzymatically deaminates a cytosine nucleobase of a C:G nucleobase pair to a uracil. The uracil may be subsequently converted to a thymine (T) by the cell's DNA repair and replication machinery. The mismatched guanine (G) on the opposite strand may subsequently be converted to an adenine (A) by the cell's DNA repair and replication machinery. In this manner, a target C:G nucleobase pair is ultimately converted to a T:A nucleobase pair. Other cytosine deaminase domains besides those provided herein are known in the art, and a person of ordinary skill in the art would recognize which cytosine deaminase domains could be used in the fusion proteins of the present disclosure.

[0154] The CBE fusion proteins described herein may further comprise one or more nuclear localization signals (NLSs) and/or one or more uracil glycosylase inhibitor (UGI) domains. Thus, the base editor fusion proteins may comprise the structure: NH₂-[first nuclear localization sequence]-[cytosine deaminase domain]-[napDNAbp domain]-[first UGI domain]-[second UGI domain]-[second nuclear localization sequence]-COOH, wherein each instance of “]-[” indicates the presence of an optional linker sequence. The CBE fusion proteins of the present disclosure may comprise modified (or evolved) cytosine deaminase domains, such as deaminase domains that recognize an expanded PAM sequence, have improved efficiency of deaminating 5′-GC targets, and/or make edits in a narrower target window.

[0155] In some aspects, the fusion proteins of the disclosure comprise an adenine base editor. Some aspects of the disclosure provide fusion proteins that comprise a nucleic acid programmable DNA binding protein (napDNAbp), such as any of the Cas14a1 variants provided herein, and at least two adenosine deaminase domains. Without wishing to be bound by any particular theory, dimerization of adenosine deaminases (e.g., in cis or in trans) may improve the ability (e.g., efficiency) of the fusion protein to modify a nucleic acid base (for example, to deaminate adenine). In some embodiments, any of the fusion proteins may comprise 2, 3, 4, or 5 adenosine deaminase domains. In some embodiments, any of the fusion proteins provided herein comprises two adenosine deaminases. In some embodiments, any of the fusion proteins provided herein contain only two adenosine deaminases. In some embodiments, the adenosine deaminases are the same. In some embodiments, the adenosine deaminases are any of the adenosine deaminases provided herein. In some embodiments, the adenosine deaminases are different. Other adenosine deaminase domains besides those provided herein are known in the art, and a person of ordinary skill in the art would recognize which adenosine deaminase domains could be used in the fusion proteins of the present disclosure.

[0156] In some embodiments, the general architecture of exemplary fusion proteins with a first adenosine deaminase, a second adenosine deaminase, and a napDNAbp (e.g., any of the Cas14a1 variants provided herein) comprises any one of the following structures, where NLS is a nuclear localization sequence (e.g., any NLS provided herein), NH₂ is the N-terminus of the fusion protein, and COOH is the C-terminus of the fusion protein: NH₂-[first adenosine deaminase]-[second adenosine deaminase]-[napDNAbp]-COOH; NH₂-[first adenosine deaminase]-[napDNAbp]-[second adenosine deaminase]-COOH; NH₂-[napDNAbp]-[first adenosine deaminase]-[second adenosine deaminase]-COOH; NH₂-[second adenosine deaminase]-[first adenosine deaminase]-[napDNAbp]-COOH; NH₂-[second adenosine deaminase]-[napDNAbp]-[first adenosine deaminase]-COOH; NH₂-[napDNAbp]-[second adenosine deaminase]-[first adenosine deaminase]-COOH.

[0157] In some embodiments, the fusion proteins provided herein do not comprise a linker.

[0158] In some embodiments, a linker is present between one or more of the domains or proteins (e.g., first adenosine deaminase, second adenosine deaminase, and/or napDNAbp). In some embodiments, the “]-[” used in the general architecture above indicates the presence of an optional linker. Exemplary fusion proteins comprising a first adenosine deaminase, a second adenosine deaminase, a napDNAbp, and an NLS are provided: NH₂-[NLS]-[first adenosine deaminase]-[second adenosine deaminase]-[napDNAbp]-COOH; NH₂-[first adenosine deaminase]-[NLS]-[second adenosine deaminase]-[napDNAbp]-COOH; NH₂-[first adenosine deaminase]-[second adenosine deaminase]-[NLS]-[napDNAbp]-COOH; NH₂-[first adenosine deaminase]-[second adenosine deaminase]-[napDNAbp]-[NLS]-COOH; NH₂-[NLS]-[first adenosine deaminase]-[napDNAbp]-[second adenosine deaminase]-COOH; NH₂-[first adenosine deaminase]-[NLS]-[napDNAbp]-[second adenosine deaminase]-COOH; NH₂-[first adenosine deaminase]-[napDNAbp]-[NLS]-[second adenosine deaminase]-COOH; NH₂-[first adenosine deaminase]-[napDNAbp]-[second adenosine deaminase]-[NLS]-COOH; NH₂-[NLS]-[napDNAbp]-[first adenosine deaminase]-[second adenosine deaminase]-COOH; NH₂-[napDNAbp]-[NLS]-[first adenosine deaminase]-[second adenosine deaminase]-COOH; NH₂-[napDNAbp]-[first adenosine deaminase]-[NLS]-[second adenosine deaminase]-COOH; NH₂-[napDNAbp]-[first adenosine deaminase]-[second adenosine deaminase]-[NLS]-COOH; NH₂-[NLS]-[second adenosine deaminase]-[first adenosine deaminase]-[napDNAbp]-COOH; NH₂-[second adenosine deaminase]-[NLS]-[first adenosine deaminase]-[napDNAbp]-COOH; NH₂-[second adenosine deaminase]-[first adenosine deaminase]-[NLS]-[napDNAbp]-COOH; NH₂-[second adenosine deaminase]-[first adenosine deaminase]-[napDNAbp]-[NLS]-COOH; NH₂-[NLS]-[second adenosine deaminase]-[napDNAbp]-[first adenosine deaminase]-COOH; NH₂-[second adenosine deaminase]-[NLS]-[napDNAbp]-[first adenosine deaminase]-COOH; NH₂-[second adenosine deaminase]-[napDNAbp]-[NLS]-[first adenosine deaminase]-COOH; NH₂-[second adenosine deaminase]-[napDNAbp]-[first adenosine deaminase]-[NLS]-COOH; NH₂-[NLS]-[napDNAbp]-[second adenosine deaminase]-[first adenosine deaminase]-COOH; NH₂-[napDNAbp]-[NLS]-[second adenosine deaminase]-[first adenosine deaminase]-COOH; NH₂-[napDNAbp]-[second adenosine deaminase]-[NLS]-[first adenosine deaminase]-COOH; NH₂-[napDNAbp]-[second adenosine deaminase]-[first adenosine deaminase]-[NLS]-COOH.

### A-TO-C Transversion Base-Editors

[0159] In various embodiments, the present disclosure provides A-to-C(or T-to-G) transversion base editor fusion proteins comprising (i) a nucleic acid programmable DNA binding protein (napDNAbp), and (ii) a nucleobase modification domain capable of facilitating the conversion of a A:T nucleobase pair to a C:G nucleobase pair in a target nucleotide sequence, e.g., a genome, such as those described in U.S. Patent Application U.S. Ser. No. 62/814,766 filed Mar. 6, 2019 and International Patent Application No. PCT/US2020/021362 filed on Mar. 6, 2020, both of which are herein incorporated by reference in their entirety.

[0160] In various embodiments, the nucleobase modification domain is an adenine oxidase, which enzymatically converts an adenine nucleobase of an A:T nucleobase pair to an 8-oxoadenine, which is subsequently converted by the cell's DNA repair and replication machinery to a cytosine, ultimately converting the A:T nucleobase pair to a C:G nucleobase pair.

[0161] The various domains of the transversion fusion proteins described herein (e.g., the Cas9 domain or the nucleobase modification domains) may be obtained as a result of mutagenizing a reference or starting-point base editor (or a component or domain thereof) by a directed evolution process, e.g., a continuous evolution method (e.g., PACE) or a non-continuous evolution method (e.g., PANCE or other discrete plate-based selections). In various embodiments, the disclosure provides a base editor that has one or more amino acid variations introduced into its amino acid sequence relative to the amino acid sequence of the reference or starting-point base editor. The base editor may include variants in one or more components or domains of the base editor (e.g., variants introduced into a Cas9 domain, an adenine oxidase domain, an inhibitor of base excision repair (iBER) domain, or a variant introduced into combinations of these domains). For example, the nucleobase modification domain may be evolved from a reference protein that is an RNA modifying enzyme (e.g., an N1-methyladenosine modification enzyme or a 5-methylcytosine modification enzyme) and evolved using PACE, PANCE, or other plate-based evolution methods to obtain a DNA modifying version of the nucleobase modification domain, which can then be used in the fusion proteins described herein.

### Adenine Oxidases

[0162] In various embodiments, the ACBE and TGBE transversion base editors provided herein comprise an adenine oxidase nucleobase modification domain. An adenine oxidase is an enzyme that has catalytic activity in oxidizing an adenosine nucleobase substrate. Oxidation reactions catalyzed by the exemplary enzymes of the present disclosure may comprise transfers of oxo (═O) substituents to the adenosine nucleobase, which creates an aldehyde, 8-oxoadenine. Exemplary oxidases of this disclosure catalyze oxidation reactions at the 8 position of adenosine. The 8 position of adenine is the most readily oxidized position on the nucleobase. See Saladino, R. et al., A new and efficient synthesis of 8-hydroxypurine derivatives by dimethyldioxirane oxidation, Tet. Lett. (1995) 36: 2665-2668; Chang, W.-C. et al., Mechanistic Investigation of a Non-Heme Iron Enzyme Catalyzed Epoxidation in (−)-4′-Methoxycyclopenin Biosynthesis, J. Am. Chem. Soc. (2016) 138(33): 10390-10393, the entire contents of each of which is herein incorporated by reference.

[0163] The adenine oxidases of the present disclosure may be modified from wild-type reference proteins, which include 5-methylcytosine, Ni-methyladenosine and xanthine modification enzymes. Other modification enzymes that may serve as reference proteins are N⁴-acetylcytosine- and 2-thiocytosine-installing RNA-modification enzymes. See Ito, S. et al. Human NAT10 Is an ATP-dependent RNA Acetyltransferase Responsible for N4-Acetylcytidine Formation in 18 S Ribosomal RNA (rRNA). J. Biol. Chem. 2014, 289, 35724-35730; and Čavužić, V.; Liu, Y., Biosynthesis of Sulfur-Containing tRNA Modifications: A Comparison of Bacterial, Archaeal, and Eukaryotic Pathways. Biomolecules 2017, 7, 27, each of which is herein incorporated by reference. Wild-type reference proteins may be those from E. coli, S. cyanogenus, yeast, mouse, human, or another organism, including other bacteria. See also Falnes, P. Ø.; Rognes, T. DNA repair by bacterial AlkB proteins, Res. Microbiol. (2003) 154(8): 531-538; Ito, S. et al., Tet proteins can convert 5-methylcytosine to 5-formylcytosine and 5-carboxylcytosine, Science (2011) 333(6047): 1300-1303; Fortini, P. et al., 8-Oxoguanine DNA damage: at the crossroad of alternative repair pathways, Mutat. Res. (2003) 531(1-2): 127-39; Leonard, G. A. et al., Conformation of guanine-8-oxoadenine base pairs in the crystal structure of d(CGCGAATT(08A)GCG), Biochem. (1992) 31(36): 8415-8420; Ohe, T. & Watanabe, Y. Purification and Properties of Xanthine Dehydrogenase from Streptomyces cyanogenus, J. Biochem. 86:45-53, (1979), the entire contents of each of which is herein incorporated by reference.

[0164] Modified adenine oxidases include variants with at least 80%, at least 85%, at least 90%, at least 95% or at least 99% sequence identity to a wild-type adenine oxidase. In other embodiments, modified adenine oxidases may be obtained by altering or evolving a reference protein using a continuous evolution process (e.g., PACE) or non-continuous evolution process (e.g., PANCE or discrete plate-based selections) described herein so that the oxidase is effective on a nucleic acid target. 8-oxopurines, common products of oxidative DNA damage, tend to rotate around the glycosidic bond to adopt the syn conformation, presenting the Hoogsteen edge for base pairing. The Hoogsteen edge of 8-oxoA and the Watson-Crick edge of G form a base pair featuring two three-center hydrogen bonding systems. The 8-oxoA:G pair makes a minimal perturbation to the DNA double helix. Consequently, polymerases misread 8-oxoA and pair it with G, eventually resulting in an A:T to C:G transversion mutation. See Kamiya, H. et al., 8-Hydroxyadenine (7,8-dihydro-8-oxoadenine) induces misincorporation in in vitro DNA synthesis and mutations in NIH 3T3 cells, Nucleic Acids Res. (1995) 23(15): 2893-2895; Tan, X., Grollman, A. P., & Shibutani, S., Comparison of the mutagenic properties of 8-oxo-7,8-dihydro-2′-deoxyadenosine and 8-oxo-7,8-dihydro-2′-deoxyguanosine DNA lesions in mammalian cells, Carcinogenesis (1999) 20(12): 2287-2292; Leonard, G. A. et al., Conformation of guanine-8-oxoadenine base pairs in the crystal structure of d(CGCGAATT(08A)GCG), Biochem. (1992) 31(36): 8415-8420, the entire contents of each of which is herein incorporated by reference.

[0165] Exemplary adenine oxidases include, but are not limited to, α-ketoglutarate-dependent iron oxidases, molybdopterin-dependent oxidases, heme iron oxidases, and flavin monooxygenases. See Rashidi, M. R. & Soltani, S., An overview of aldehyde oxidase: an enzyme of emerging importance in novel drug discovery, Expert Opin. Drug Discov. (2017) 12(3): 305-316; Coon, M. J., Cytochrome P450: nature's most versatile biological catalyst, Annu. Rev. Pharmacol. Taxicol. (2005) 45: 1-25; Eswaramoorthy, S. et al., Mechanism of action of a flavin-containing monooxygenase, Proc. Natl. Acad. Sci. (2006) 103(26): 9832-9837, the entire contents of each of which is herein incorporated by reference.

[0166] Exemplary α-ketoglutarate-dependent iron oxidases include AlkbH (ABH) family oxidases, which include human AlkBH3, is to clear Ni-methylation from adenine in DNA and RNA. These non-heme enzymes perform methyl group C—H hydroxylation on DNA and RNA via an active Fe(IV)-oxo intermediate formed through an iron cofactor. The resulting hemiaminal breaks down to release formaldehyde and the demethylated adenine base. ABH3 is selective for ssDNA over dsDNA, a characteristic of exocyclic amine-hydrolyzing enzymes that likely contributes to the selective modification of bases in the targeted ssDNA loop of the ternary Cas9-sgRNA-DNA complex. The TET oxidases are structurally related α-ketoglutarate-dependent iron oxidases and perform C—H hydroxylation on 5-methylcytosine as the first step in removing this important epigenetic marker. Oxidized forms of 5-methylcytosine are recognized by DNA glycosylases and hydrolytically removed, to be replaced eventually by unmethylated cytosine. Without being bound by a particular theory, in the absence of a labile C—H bond substrate, the Fe(IV)-oxo species of the cofactor-enzyme may be induced to transfer the oxo group from the non-heme Fe(IV) center to the 8 position of adenine. This potential mechanism involves the formation of a 7,8-oxaziridine intermediate, which rearranges spontaneously to the desired 8-oxoadenine.

[0167] Exemplary molybdopterin-dependent oxidases that selectively oxidize adenine at the 8 position include xanthine dehydrogenases and aldehyde oxidases. In eukaryotes, these enzymes utilize a monophosphate pyranopterin cofactor, which complexes with a molybdenum to form molybdenum cofactor (Moco). These oxidases may effect alkene/arene epoxidation reactions in natural product biosynthesis pathways via similar oxo group transfer mechanisms as those of the non-heme ABH and TET iron oxidases.

[0168] Exemplary heme iron oxidases that selectively oxidize adenine at the 8 position include cytochrome P450 enzymes.

### G-to-T Transversion Base-Editors

[0169] In various embodiments, the present disclosure provides G-to-T (or C-to-A) transversion base editor fusion proteins, such as those described in U.S. Provisional Patent Application, U.S. Ser. No. 62/768,062, filed Nov. 15, 2018, International Patent Application No. PCT/US2019/061685, filed Nov. 15, 2019, and U.S. patent application U.S. Ser. No. 17/294,287, filed May 14, 2021, all of which are hereby incorporated by reference in their entirety.

[0170] In some embodiments, the fusion proteins comprise (i) a nucleic acid programmable DNA binding protein (napDNAbp), and (ii) a nucleobase modification moiety that is capable of facilitating the conversion of a G to a T in a target nucleotide sequence, e.g., a genome (or equivalently, which is capable of facilitating the conversion of a G:C nucleobase pair to a T:A nucleobase pair). In various embodiments, the nucleobase modification moiety can be a guanine oxidase, which enzymatically converts a guanine nucleobase of a G:C nucleobase pair to 8-oxo-guanine, which then is subsequently processed by the cell's DNA repair and replication machinery to a thymine, thereby converting the G:C nucleobase pair to a T:A nucleobase pair. In other embodiments, the nucleobase modification moiety can be a guanine methyltransferase, which enzymatically converts a guanine nucleobase of a G:C nucleobase pair to 8-methyl-guanine, which then is subsequently processed by the cell's DNA repair and replication machinery to a thymine, thereby converting the G:C nucleobase pair to a T:A nucleobase pair. In still other embodiments, the nucleobase modification moiety can be a guanine methyltransferase, which enzymatically converts a guanine nucleobase of a G:C nucleobase pair to a Ni-methyl-guanine or to an N2,N2-dimethyl-guanine, which then is subsequently processed by the cell's DNA repair and replication machinery to a thymine, thereby converting the G:C nucleobase pair to a T:A nucleobase pair.

[0171] The various domains of the transversion fusion proteins described herein (e.g., the Cas9 domain or the nucleobase modification domains) can be obtained as a result of mutagenizing a reference or starting-point base editor (or a component or domain thereof) by a directed evolution process, e.g., a continuous evolution method (e.g., PACE) or PANCE. In various embodiments, the disclosure provides an evolved base editor that has one or more amino acid variations introduced into its amino acid sequence relative to the amino acid sequence of the reference or starting-point base editor. The evolved base editor may include variants in one or more components or domains of the base editor (e.g., variants introduced into a Cas9 domain, a guanine oxidase domain, or 8-oxoguanine glycosylase (OGG) inhibitor domain, or variants introduced into combinations of these domains). For example, the nucleobase modification domain can be evolved from a reference protein that is an RNA modifying enzyme and evolved using PACE of PANCE to obtain a DNA modifying version of the nucleobase modification domain, which can then be used in the fusion proteins described herein.

[0172] In one embodiment, the guanine oxidase is a wild-type guanine oxidase, or a variant thereof, that oxidizes a guanine in DNA. In certain embodiments, the guanine oxidase is a xanthine dehydrogenase, or a variant thereof. In certain embodiments, the xanthine dehydrogenase is a Streptomyces cyanogenus xanthine dehydrogenase (ScXDH) or variant thereof. In other embodiments, the xanthine dehydrogenase or variant thereof is derived from C. capitata, N. crassa, M. hansupus, E. cloacae, S. snoursei, S. albulus, S. himastatinicus, or S. lividans.

[0173] In various embodiments, the fusion protein further comprises an 8-oxoguanine glycosylase (OGG) inhibitor. In certain embodiments, the OGG inhibitor binds to 8-oxoguanine (8-oxo-G) and may comprise a catalytically inactive OGG enzyme. In various embodiments, the base editor fusion proteins described herein can comprise any of the following structures: NH₂-[napDNAbp]-[guanine oxidase]-COOH; NH₂-[guanine oxidase]-[napDNAbp]-COOH; NH₂-[OGG inhibitor]-[napDNAbp]-[guanine oxidase]-COOH; NH₂-[napDNAbp]-[OGG inhibitor]-[guanine oxidase]-COOH; NH₂-[napDNAbp]-[guanine oxidase]-[OGG inhibitor]-COOH; NH₂-[OGG inhibitor]-[guanine oxidase]-[napDNAbp]-COOH; NH₂-[guanine oxidase]-[OGG inhibitor]-[napDNAbp]-COOH; or NH₂-[guanine oxidase]-[napDNAbp]-[OGG inhibitor]-COOH; wherein each instance of “-” comprises an optional linker.

[0174] In another embodiment, the base editor fusion protein comprises (i) a nucleic acid programmable DNA binding protein (napDNAbp), and (ii) a guanine methyltransferase. In various embodiments of the base editor fusion proteins, the guanine methyltransferase is a wild-type guanine methyltransferase. In certain embodiments, the guanine methyltransferase is a wild-type RlmA, or a variant thereof, that methylates a guanine in DNA. In certain embodiments, the RlmA is a Escherichia coli RlmA, or a variant thereof.

[0175] In one embodiment, the guanine methyltransferase is a dimethyl transferase that methylates a guanine to N2,N2-dimethylguanine. In various embodiments, the dimethyl transferase is a Trm1, or a variant thereof, that methylates a guanine in DNA. In other embodiments, the dimethyl transferase is a Aquifex aeolicus Trm1 or variant thereof. In certain embodiments, the dimethyl transferase is a human Trm1 or variant thereof. In certain embodiments, the dimethyl transferase is a Saccharomyces cerevisiae Trm1 or variant thereof.

[0176] In one embodiment, the guanine methyltransferase methylates a guanine to Ni-methyl-guanine. In various embodiments, the methyltransferase is a RlmA, a TrmT10A, a Termed, or variants thereof, that methylates a guanine in DNA. In various embodiments, the methyltransferase is an Escherichia coli RlmA, human TrmT10A, Escherichia coli Termed, M. Jannaschii Trm5b or P. Abyssi Trm5b. In certain embodiments, the methyltransferase is an Escherichia coli Termed having one or more of the following mutations: M149V, G189V, and E194K.

[0177] In various embodiments, the base editor fusion proteins described herein can comprise any of the following structures: NH₂-[napDNAbp]-[guanine methyltransferase]-COOH; NH₂-[guanine methyltransferase]-[napDNAbp]-COOH; NH₂-[ALRE inhibitor]-[napDNAbp]-[guanine oxidase]-COOH; NH₂-[napDNAbp]-[ALRE inhibitor]-[guanine oxidase]-COOH; NH₂-[napDNAbp]-[guanine oxidase]-[ALRE inhibitor]-COOH; NH₂-[ALRE inhibitor]-[guanine oxidase]-[napDNAbp]-COOH; NH₂-[guanine oxidase]-[ALRE inhibitor]-[napDNAbp]-COOH; or NH₂-[guanine oxidase]-[napDNAbp]-[ALRE inhibitor]-COOH; wherein each instance of “-” comprises an optional linker.

[0178] In still another embodiment, the guanine methyltransferase methylates a guanine to 8-methyl-guanine. 8-methyl-guanine induces steric rotation of the damaged G, forcing base pairing with the Hoogsteen face of 8-methyl-guanine. As a result and through the cell's replication and repair processes, 8-methyl-guanine pairs with A and results in a G-to-T transversion. In certain embodiments, the guanine methyltransferase is a wild-type Cfr, or a variant thereof, that methylates a guanine in DNA. In certain embodiments, the Cfr is a Staphylococcus scirui Cfr, or a variant thereof.

[0179] In some embodiments, any of the base editor proteins provided herein may further comprise one or more additional nucleobase modification moieties, such as, for example, an inhibitor of 8-oxoguanine glycosylase (OGG) domain. Without wishing to be bound by any particular theory, the OGG inhibitor domain may inhibit or prevent base excision repair of a oxidized guanine residue, which may improve the activity or efficiency of the base editor. Additional base editor functionalities are further described herein.

### Guanine Oxidases

[0180] In various embodiments, the transversion base editors provided herein comprise one or more nucleobase modification domains (e.g., guanine oxidase). Optionally, these domains may be obtained by evolving a reference version (e.g., an RNA modification enzyme) evolved using a continuous evolution process (e.g., PACE) described herein so that the nucleobase modification domain is effective on a DNA target.

[0181] In various embodiments, the nucleobase modification moiety may be any protein, enzyme, or polypeptide (or functional fragment thereof) which is capable of modifying a nucleobase. Nucleobase modification moieties can be naturally occurring or recombinant. Exemplary nucleobase modification moieties include, but are not limited to, a guanine oxidase. In some embodiments the modification moiety is a guanine oxidase (e.g., ScXDH), or an evolved variant thereof.

### Guanine Methyltransferases

[0182] In various embodiments, the transversion base editors provided herein comprise one or more nucleobase modification moieties (e.g., guanine methyltransferase). Optionally, these moieties may be evolved using a continuous evolution process (e.g., PACE or PANCE) described herein.

[0183] In various embodiments, the nucleobase modification moiety may be any protein, enzyme, or polypeptide (or functional fragment thereof) which is capable of modifying a nucleobase. Nucleobase modification moieties can be naturally occurring, or can be engineered or modified. A nucleobase modification moiety can have one or more types of enzymatic activities, including, but not limited to, endonuclease activity, polymerase activity, ligase activity, replication activity, or proofreading activity. Nucleobase modification moieties can also include DNA or RNA-modifying enzymes and/or mutagenic enzymes, such as, DNA methylases and alkylating enzymes (i.e., guanine methyltransferases), which covalently modify nucleobases leading in some cases to mutagenic corrections by way of normal cellular DNA repair and replication processes. Exemplary nucleobase modification moieties include, but are not limited to, a guanine methyltransferase, a nuclease, a nickase, a recombinase, a methylase, an acetylase, an acetyltransferase, a transcriptional activator, or a transcriptional repressor domain. In some embodiments the nucleobase modification moiety is a guanine methyltransferase (e.g., RlmA (E. coli)), or an evolved variant thereof.

### T-to-G Transversion Base-Editors

[0184] In various embodiments, the nucleotide modification domain is a transglycosylase that enzymatically exchanges a thymine nucleobase of a T:A nucleobase pair with a guanine, such as those disclosed in U.S. Provisional Patent Application, U.S. Ser. No. 62/887,307, filed Aug. 15, 2019 and International Patent Application No. PCT/US2020/046320, filed Aug. 14, 2020, both of which are herein incorporated by reference in their entirety. In other embodiments, the transglycosylase enzymatically exchanges a thymine nucleobase of a T:A nucleobase pair with a 7-deazaguanine derivative, which is subsequently converted by the cell's DNA repair and replication machinery to a guanine. In both of these embodiments, the T:A nucleobase pair is ultimately converted to a G:C nucleobase pair.

[0185] The various domains of the transversion fusion proteins described herein (e.g., the Cas9 domain or the nucleotide modification domains) may be obtained as a result of mutagenizing a reference base editor (or a component or domain thereof) by a directed evolution process, e.g., a continuous evolution method (e.g., PACE) or a non-continuous evolution method (e.g., PANCE or other discrete plate-based selections). In various embodiments, the disclosure provides a base editor that has one or more amino acid variations introduced into its amino acid sequence relative to the amino acid sequence of the reference base editor. The base editor may include variants in one or more components or domains of the base editor (e.g., variants introduced into a Cas9 domain, variants introduced into a transglycosylase domain, or a variant introduced into both of these domains).

[0186] The nucleotide modification domain may be engineered in any way known to those of skill in the art. For example, the nucleotide modification domain may be evolved from a reference protein that is an RNA modifying enzyme (e.g., a tRNA guanine transglycosylase) and evolved using PACE, PANCE, or other plate-based evolution methods to obtain a DNA modifying version of the nucleotide modification domain, which can then be used in the fusion proteins described herein. For example, the disclosed transglycosylase variants may be at least about 70% identical, at least about 80% identical, at least about 90% identical, at least about 95% identical, at least about 96% identical, at least about 97% identical, at least about 98% identical, at least about 99% identical, at least about 99.5% identical, or at least about 99.9% identical to the reference enzyme. In some embodiments, the transglycosylase variant may have 1, 2, 3, 4, 5, 6,7, 8, 9, 10, 11, 12, 13, 14, 15, 16, 17, 18, 19, 20, 21, 22, 21, 24, 25, 26, 27, 28, 29, 30, 31, 32, 33, 34, 35, 36, 37, 38, 39, 40, 41, 42, 43, 44, 45, 46, 47, 48, 49, 50 or more amino acid changes compared to a reference transglycosylase. In other embodiments, the transglycosylase variant comprises multiple amino acid stretches having about 99.9% identity, followed by one or more stretches having at least about 90% or at least about 95% identity, followed by stretches of having about 99.9% identity, to the corresponding amino acid sequence of the reference transglycosylase.

### Transglycosylases

[0187] In various embodiments, the TGBE (and ACBE) base editors provided herein comprise a transglycosylase nucleotide modification domain. Any transglycosylase that is adapted to accept guanine nucleotide substrates are useful in the base editors and methods of editing disclosed herein. The tranglycosylase may comprise a naturally-occurring or engineered transglycosylase, e.g. an engineered guanine transglycosylase. A guanine transglycosylase is an enzyme that catalyzes the substitution of a queuine (abbreviated Q) (or precursor of queuine) nucleobase analog for a guanine nucleobase in a polynucleotide substrate. This reaction forms a queuosine (or prequeuosine) nucleoside.

[0188] An exemplary bacterial transglycosylase, tRNA guanine transglycosylase (TGT) catalyzes the exchange of prequeuinei for guanine 34 in the UGU sequence of the anticodon loop of a tRNA. See Nonekowski, Kung & Gracia, The Escherichia coli tRNA-Guanine Transglycosylase Can Recognize and Modify DNA, J. Biol. Chem., 277(9):7178-82 (2002), incorporated herein by reference. Guanine 34 occupies the first anticodon position of the tRNA, which pairs with the third, “wobble” position in a complementary codon. The mechanism of the base exchange reaction catalyzed by E. coli TGT involves a covalent TGT-RNA complex that is thermodynamically and kinetically stable, wherein the Asp₂₆₄ residue of the enzyme is bound to the 1′ position of the ribose ring. See Garcia, Chervin & Kittendorf, Identification of the Rate-Determining Step of tRNA-Guanine Transglycosylase from Escherichia coli, Biochemistry 2009, 48, 11243-11251, incorporated herein by reference. In the next step, a 7-amino-methyl-7-deazaguanine (abbreviated preQ1) replaces the aspartate active site residue, releasing the TGT. Finally, PreQ₁ is converted to Q. When preQi is absent, TGT is also capable of using 7-cyano-7-deazaguanine (preQ₀) as the second nucleobase substrate for this reaction. PreQ₀ is a common precursor of queuosine (Q) and archaeosine (G+).

[0189] The prokaryotic TGT is capable of recognizing and exchanging a deoxyguanine nucleobase within a dU-G-dU trinucleotide sequence in a DNA hairpin substrate (dU=2′deoxyuridine). See Nonekowski, Kung & Gracia, J. Biol. Chem. (2002). This establishes that TGT recognition is not critically dependent on a ribose backbone. Further, it is demonstrated in the Examples provided herein that wild-type TGT is capable of editing target guanines in non-UGU sequences in DNA hairpins.

[0190] In eukaryotes, the preQi intermediate may be converted to a glycosylated queuosine product (glycosyl-Q).

[0191] A separate transglycosylase, the prokaryotic DpdA protein, is expressed from “gene A” located in a ˜20 kb “dpd” gene cluster that also contains preQ₀ synthesis and DNA metabolism genes. See Thiaville, et al., Novel genomic island modifies DNA with 7-deazaguanine derivatives, PNAS, 113(11):E1452-9 (2016). This gene cluster is found in genomic islands. The DpdA enzyme catalyzes the exchange of preQ₀ (or 7-amido-7-deazaguanine (ADG)) for guanine in bacterial and bacteriophage genomic DNA. The core of DpdA shows significant similarity to the TGT enzyme, as the key aspartate residues that catalyze the base exchange (Asp102 and Asp280 of Zymomonas mobilis TGT and Asp95 and Asp249 of Pyrococcus horikoshii TGT), as well as the zinc binding site (CXCXXCX₂₂H motif), are conserved in DpdAs.

[0192] Prokaryotic DpdA is capable of recognizing and exchanging a deoxyguanine nucleobase in a DNA substrate with preQ₀. The product of this base exchange reaction, dPreQ₀ nucleoside (i.e., 7-deazaguanine derivative nucleoside), were recently discovered in bacterial DNA. The product of a similar base exchange reaction, deoxyarchaeosine (dG⁺), was recently discovered in phage DNA. See id. More recently, it was confirmed that three genes of the S. Montevideo dpd gene cluster—dpd genes A, B, and C, which may encode a DpdAB complex and DpdC enzyme—are required for the formation of preQ₀ and ADG in DNA. See Yuan et al., Identification of the minimal bacterial 2′-deoxy-7-amido-7-deazaguanine synthesis machinery, Mol. Microbiol., 110(3):469-483 (2018).

[0193] The transglycosylases useful in the present disclosure may be modified from wild-type reference proteins, which include TGT and DpdA, to recognize and excise a target thymine base in DNA as a first nucleobase substrate. In the disclosed TGBEs, the target thymine is replaced with a guanine. It is believed that wild-type and evolved variant transglycosylases are capable of inserting guanine into DNA (i.e., as a second nucleobase substrate) because this step represents the chemical reverse of the first recognition step of the native guanine base excision reaction. Thus, evolved TGT and DpdA variants that recognize and excise a thymine base in DNA are provided in the present disclosure. Wild-type reference transglycosylases may be those from E. coli, S. Montevideo, bacteriophage (such as E. coli phage 9g), yeast, mouse, human, or another organism, including other bacteria and bacteriophages.

[0194] Modified transglycosylases include variants with at least 80%, at least 85%, at least 90%, at least 95% or at least 99% sequence identity to a wild-type transglycosylase. In other embodiments, modified transglycosylases may be obtained by altering or evolving a reference protein using a continuous evolution process (e.g., PACE) or non-continuous evolution process (e.g., PANCE or discrete plate-based selections) described herein so that the transglycosylase is effective on a thymine base of a nucleic acid target (e.g., a DNA target).

[0195] Based on the mechanisms elucidated immediately above with respect to wild-type TGT and DpdA base exchange involving a guanine first nucleobase substrate, the following mechanism is proposed for disclosed TGT and DpdA variants that recognize a thymine first nucleobase substrate (without wishing to be bound by any particular theory). First, the TGT (or DpdA) variant excises the thymine from 1′ position of the deoxyribose sugar and covalently bonds to the sugar, thus forming a covalent intermediate (for instance, TGT-DNA in cases where the transglycosylase is a TGT). This intermediate may be formed at an active site aspartate residue of the TGT (or DpdA) variant. Subsequently, a free guanine excises the active site residue in a nucleophilic attack, reforming a glycosidic bond.

[0196] In some embodiments (e.g., in prokaryotes), the disclosed TGT and DpdA variants uses free deazaguanine derivatives, such as PreQ₀ or PreQ₁, to excise the thymine and form a 2′-deoxy-7-cyano-7-deazaguanosine (dPreQ₀) or 2′-deoxy-7-amino-methyl-7-deazaguanosine (dPreQ₁) product. During a subsequent round of replication, the cell's mismatch repair machinery converts the dPreQ₀ or dPreQ₁ to a guanosine, thereby completing the T-to-G change. Deazaguanines and their derivatives are not normally found in eukaryotic cells. Because guanine is much more abundant in the eukaryotic nucleus than any deazaguanine derivative, this reaction is expected to proceed through a guanine nucleobase substrate in eukaryotes, and not through a deazaguanine derivative. As such, in mammalian cells, this reaction is expected to proceed through a guanine nucleobase substrate.

[0197] In certain embodiments, the transglycosylase is a bacterial TGT, or a variant thereof. Exemplary transglycosylases include, but are not limited to, E. coli TGT, Pyrococcus horikoshii TGT, Zymomonas mobilis TGT, E. coli DpdA,Salmonella enterica serovar Montevideo DpdA, Streptomyces sp. FXJ7.023 DpdA, Nocardioidaceae bacterium Broad-1 DpdA, Desulfurobacterium thermolithotrophum DpdA, Cyanothece sp. CCY0110 DpdA, E. coli phage 9g DpdA, Streptococcus pneumoniae phage Dp-1 DpdA, Mycobacterium smegmatis phage Suffolk DpdA, Mycobacterium avium phage Hedgerow DpdA, Paenibacillus glucanolyticus phage PG1 DpdA, Sulfolobus islandicus phage SIRV1 DpdA, or Bacillus cereus phage BCD7 DpdA, or a variant thereof.

### A-to-T Transversion Base Editors

[0198] In various embodiments, the present disclosure provides T-to-A (or A-to-T) transversion base editor fusion protein, such as those described in U.S. Provisional Patent Application U.S. Ser. No. 62/814,793 filed on Mar. 6, 2019, International Patent Application No. PCT/US2020/021398 filed on Mar. 6, 2020, and U.S. patent application U.S. Ser. No. 17/436,048 filed on Sep. 2, 2021, all of which are hereby incorporated by reference in their entirety.

[0199] In some embodiments, the fusion proteins compries (i) a nucleic acid programmable DNA binding protein (napDNAbp), and (ii) a nucleobase modification domain capable of facilitating the conversion of a A:T nucleobase pair to a T:A nucleobase pair in a target nucleotide sequence, e.g., a genome.

[0200] In various embodiments, the nucleobase modification domain may be an adenosine methyltransferase, which enzymatically converts an adenosine nucleoside of an A:T nucleobase pair to N1-methyladenosine, which then is subsequently processed by the cell's DNA repair and replication machinery to a thymine, thereby converting the A:T nucleobase pair to a T:A nucleobase pair.

[0201] The various domains of the transversion fusion proteins described herein (e.g., the Cas9 domain or the nucleobase modification domains) may be obtained as a result of mutagenizing a reference or starting-point base editor (or a component or domain thereof) by an evolution or modification strategy. Such strategies include a directed evolution process, e.g., a continuous evolution method (e.g., PACE) or a non-continuous evolution method (e.g., PANCE or other discrete plate-based selections). In various embodiments, the disclosure provides a base editor that has one or more amino acid variations introduced into its amino acid sequence relative to the amino acid sequence of the reference or starting-point base editor. The base editor may include variants in one or more components or domains of the base editor (e.g., variants introduced into a Cas9 domain, an adenosine methyltransferase domain, an inhibitor of DNA alkylation repair (iDAR) domain, or variants introduced into combinations of these domains). For example, the nucleobase modification domain may be evolved from a reference protein that is an RNA modifying enzyme (e.g., a mRNA or tRNA methyltransferase) and evolved using PACE, PANCE, or other plate-based evolution methods to obtain a DNA modifying version of the nucleobase modification domain, which can then be used in the fusion proteins described herein.

### Adenosine Methyltransferases

[0202] In various embodiments, the transversion base editors provided herein comprise an adenosine methyltransferase. The adenosine methyltransferase may be modified from its wild type form. Modified methyltransferases may be obtained by, e.g., evolving a reference version (e.g., an RNA modification enzyme, such as an mRNA and/or tRNA methyltransferase) using a continuous evolution process (e.g., PACE) or non-continuous evolution process (e.g., PANCE or plate-based selections) described herein so that the methyltransferase domain is effective on a nucleic acid target. See Zhang C. & Jia, G., Reversible RNA Modification N1-methyladenosine (m¹A) in mRNA and tRNA, Genomics Proteomics Bioinformatics 16:155-161 (2018), the contents of which is herein incorporated by reference in its entirety.

[0203] In some embodiments, the modification domain is a TRM61 monomer (e.g., human or S. cerevisiae), or a TRM6/61A dimer (e.g., human or S. cerevisiae), or evolved a variant thereof.

[0204] The desired adenosine methylation reaction produces an N1-methyladenosine (mlA). The presence of an adenine base on the unmutated strand induces the steric rotation of the N1-methyladenosine product to the Hoogsteen orientation in order to base pair with an adenine base on the non-edited strand. See Chawla M. et al., An atlas of RNA base pairs involving modified nucleobases with optimal geometries and accurate energies, Nucleic Acid Res. (2015), the disclosure of which is herein incorporated by reference in its entirety.

### A-to-T Transversion Base-Editors

[0205] In various embodiments, the present disclosure provides A-to-T (or T-to-A) transversion base editor fusion proteins, such as those described in U.S. Provisional Patent Application U.S. Ser. No. 62/814,800, filed Mar. 6, 2019, and International Patent Application No. PCT/US2020/021405, filed Mar. 6, 2020, both of which are herein incorporated by reference in their entirety.

[0206] In some embodiments, the fusion protein comprises (i) a nucleic acid programmable DNA binding protein (napDNAbp), and (ii) a nucleobase modification domain capable of facilitating the conversion of a A:T nucleobase pair to a T:A nucleobase pair in a target nucleotide sequence, e.g., a genome.

[0207] In various embodiments, the nucleobase modification domain may comprise a deaminase and a glycosylase, which enzymatically removes the inosine product of a catalyzed deamination of an adenine nucleobase in a A:T nucleobase pair, creating an apurinic site that may be replaced by the cell's DNA repair and replication machinery to a T:A nucleobase pair.

[0208] In various embodiments, the nucleobase modification domain is a thymine alkyltransferase, which enzymatically converts a thymine nucleobase of a T:A nucleobase pair to an alkylated thymine, which then is subsequently processed by the cell's DNA repair and replication machinery to an adenine, ultimately converting the T:A nucleobase pair to an A:T nucleobase pair.

[0209] The various domains of the transversion fusion proteins described herein (e.g., the Cas9 domain or the nucleobase modification domains) may be obtained as a result of mutagenizing a reference or starting-point base editor (or a component or domain thereof) by an evolution or modification strategy. Such strategies include a directed evolution process, e.g., a continuous evolution method (e.g., PACE) or a non-continuous evolution method (e.g., PANCE or other discrete plate-based selections). In various embodiments, the disclosure provides a base editor that has one or more amino acid variations introduced into its amino acid sequence relative to the amino acid sequence of the reference or starting-point base editor. The base editor may include variants in one or more components or domains of the base editor (e.g., variants introduced into a Cas9 domain, a deaminase domain, a glycosylase domain, a thymine alkyltransferase domain, an inhibitor of DNA alkylation repair (iDAR) domain, or variants introduced into combinations of these domains). For example, the nucleobase modification domain may be evolved from a reference protein that is a DNA modifying enzyme (e.g., a glycosylase that has as its substrate alkylated DNA) and evolved using PACE, PANCE, or other plate-based evolution methods to obtain a DNA modifying version of the nucleobase modification domain, which can then be used in the fusion proteins described herein. Alternatively, the nucleobase modification domain may be evolved from a reference protein that is an RNA modifying enzyme (e.g., uridine rRNA methyltransferases) and evolved using PACE, PANCE, or other plate-based evolution methods to obtain a DNA modifying version of the nucleobase modification domain, which can then be used in the fusion proteins described herein.

### Glycosylases

[0210] In various embodiments, the transversion base editors provided herein comprise a glycosylase. The glycosylase may be modified from its wild type form. Modified glycosylases may be obtained by, e.g., evolving a reference version (e.g., an alkylated DNA glycosylase enzyme) using a continuous evolution process (e.g., PACE) or non-continuous evolution process (e.g., PANCE or plate-based selections) described herein so that the glycosylase is effective on a nucleic acid target.

[0211] Exemplary glycosylases include, but are not limited to, a DNA glycosylase. In some embodiments, the glycosylase is an inosine excision enzyme (e.g., MPG), or an evolved variant thereof. In some embodiments, the glycosylase comprises an inosine excision enzyme and a TadA adenosine deaminase homodimer, or a variant thereof.

### Thymine Alkyltransferases

[0212] In various embodiments, the transversion base editors provided herein comprise a thymine alkyltransferase. The thymine alkyltransferase may be modified from its wild type form. Modified thymine alkyltransferases may be obtained by, e.g., evolving a reference version (e.g., an RNA modification enzyme such as a ribosomal RNA alkyltransferase) using a continuous evolution process (e.g., PACE) or non-continuous evolution process (e.g., PANCE or discrete plate-based selections) described herein so that the alkyltransferase is effective on a nucleic acid target. See Sharma et al., Identification of novel methyltransferases, Bmt5 and Bmt6, responsible for the m³U methylations of 25S rRNA in Saccharomyces cerevisiae, Nucleic Acid Res. (2014) 42(5): 3246-3260 and Meyer et al., Ribosome biogenesis factor Tsr3 is the aminocarboxypropyl transferase responsible for 18S rRNA hypermodification in yeast and humans, Nucleic Acid Res. (2016) 44(9): 4304-4316, the entire contents of each of which is herein incorporated by reference.

[0213] In some embodiments, the nucleobase modification domain is a thymine alkyltransferase (e.g., RsmE (E. coli)), or an evolved variant thereof.

[0214] The desired thymine alkylation reaction, i.e., the reaction that produces an N3-methyl-thymine, N3-carboxymethyl thymine, or N3-3-amino-3-carboxypropyl thymine product, may be selected based on the relevant enzyme and S-adenosyl-methionine (SAM) cofactor used in the reaction. To yield an N3-methyl-thymine product, an unmodified SAM is used with an Escherichia coli RsmE, a Saccharomyces cerevisiae Bmt5 or a Saccharomyces cerevisiae Bmt6, or a variant thereof. To yield an N3-3-amino-3-carboxypropyl thymine product, an unmodified SAM is used with a Tsr3 aminocaroboxypropyl transferase, or variant thereof. To yield an N3-carboxymethyl thymine, a SAM cofactor modified to include a carboxymethyl domain on the S⁺ center may be used. A variant of an Escherichia coli RsmE, a Saccharomyces cerevisiae Bmt5 or a Saccharomyces cerevisiae Bmt6 that has been evolved using a continuous evolution process (e.g., PACE) to accept a carboxylated SAM cofactor may be used.

### Additional Base Editor Elements

### Linkers

[0215] In certain embodiments, linkers may be used to link any of the peptides or peptide domains or domains of the base editor (e.g., domain A covalently linked to domain B which is covalently linked to domain C).

[0216] As defined above, the term “linker,” as used herein, refers to a chemical group or a molecule linking two molecules or domains, e.g., a binding domain and a cleavage domain of a nuclease. In some embodiments, a linker joins a gRNA binding domain of a napDNAbp and the catalytic domain of a recombinase. In some embodiments, a linker joins a dCas9 and base editor domain (e.g., an adenine deaminase). Typically, the linker is positioned between, or flanked by, two groups, molecules, or other domains and connected to each one via a covalent bond, thus connecting the two. In some embodiments, the linker is an amino acid or a plurality of amino acids (e.g., a peptide or protein). In some embodiments, the linker is an organic molecule, group, polymer, or chemical domain. Chemical domains include, but are not limited to, disulfide, hydrazone, thiol and azo domains. In some embodiments, the linker is 5-100 amino acids in length, for example, 5, 6, 7, 8, 9, 10, 11, 12, 13, 14, 15, 16, 17, 18, 19, 20, 21, 22, 23, 24, 25, 26, 27, 28, 29, 30, 30-35, 35-40, 40-45, 45-50, 50-60, 60-70, 70-80, 80-90, 90-100, 100-150, or 150-200 amino acids in length. In some embodiments, the linker is a molecule in length. Longer or shorter linkers are also contemplated.

[0217] The linker may be as simple as a covalent bond, or it may be a polymeric linker many atoms in length. In certain embodiments, the linker is a polypeptide or based on amino acids. In other embodiments, the linker is not peptide-like. In certain embodiments, the linker is a covalent bond (e.g., a carbon-carbon bond, disulfide bond, carbon-heteroatom bond, etc.). In certain embodiments, the linker is a carbon-nitrogen bond of an amide linkage. In certain embodiments, the linker is a cyclic or acyclic, substituted or unsubstituted, branched or unbranched aliphatic or heteroaliphatic linker. In certain embodiments, the linker is polymeric (e.g., polyethylene, polyethylene glycol, polyamide, polyester, etc.). In certain embodiments, the linker comprises a monomer, dimer, or polymer of aminoalkanoic acid. In certain embodiments, the linker comprises an aminoalkanoic acid (e.g., glycine, ethanoic acid, alanine, beta-alanine, 3-aminopropanoic acid, 4-aminobutanoic acid, 5-pentanoic acid, etc.). In certain embodiments, the linker comprises a monomer, dimer, or polymer of aminohexanoic acid (Ahx). In certain embodiments, the linker is based on a carbocyclic domain (e.g., cyclopentane, cyclohexane). In other embodiments, the linker comprises a polyethylene glycol domain (PEG). In other embodiments, the linker comprises amino acids. In certain embodiments, the linker comprises a peptide. In certain embodiments, the linker comprises an aryl or heteroaryl domain. In certain embodiments, the linker is based on a phenyl ring. The linker may include functionalized domains to facilitate attachment of a nucleophile (e.g., thiol, amino) from the peptide to the linker. Any electrophile may be used as part of the linker. Exemplary electrophiles include, but are not limited to, activated esters, activated amides, Michael acceptors, alkyl halides, aryl halides, acyl halides, and isothiocyanates.

[0218] In some other embodiments, the linker comprises the amino acid sequence (GGGGS)ₙ (SEQ ID NO: 119), (G)ₙ(SEQ ID NO: 120), (EAAAK)ₙ (SEQ ID NO: 121), (GGS)ₙ (SEQ ID NO: 122), (SGGS)ₙ(SEQ ID NO: 123), (XP)ₙ (SEQ ID NO: 124), or any combination thereof, wherein n is independently an integer between 1 and 30, and wherein X is any amino acid. In some embodiments, the linker comprises the amino acid sequence (GGS)ₙ(SEQ ID NO: 125), wherein n is 1, 3, or 7. In some embodiments, the linker comprises the amino acid sequence SGSETPGTSESATPES (SEQ ID NO: 126). In some embodiments, the linker comprises the amino acid sequence SGGSSGGSSGSETPGTSESATPESSGGSSGGS (SEQ ID NO: 127). In some embodiments, the linker comprises the amino acid sequence SGGSGGSGGS (SEQ ID NO: 128). In some embodiments, the linker comprises the amino acid sequence SGGS (SEQ ID NO: 129).

[0219] In some embodiments, the fusion protein comprises the structure [domain B]-[optional linker sequence]-[domain A]-[optional linker sequence], or [domain A]-[optional linker sequence]-[domain B].

[0220] In some embodiments, the fusion protein comprises the structure [domain B]-[optional linker sequence]-[domain A]-[optional linker sequence]-[domain C]; [domain B]-[optional linker sequence]-[domain C]-[optional linker sequence]-[domain A]; [domain C]-[optional linker sequence]-[domain B]-[optional linker sequence]-[domain A]; [domain C]-[optional linker sequence]-[domain A]-[optional linker sequence]-[domain B]; [domain A]-[optional linker sequence]-[domain C]-[optional linker sequence]-[domain B]; or [domain A]-[optional linker sequence]-[domain B]-[optional linker sequence]-[domain C].

[0221] In some embodiments, the fusion protein comprises one or more nuclear localization sequences, and comprises the structure [domain B]-[optional linker sequence]-[domain A]-[optional linker sequence]-[domain C]-[optional linker sequence]-[NLS]; [NLS]-[optional linker sequence]-[domain B]-[optional linker sequence]-[domain A]-[optional linker sequence]-[domain C]; [domain B]-[optional linker sequence]-[iBER]-[optional linker sequence]-[domain A]-[optional linker sequence]-[NLS]; [NLS]-[optional linker sequence]-[domain B]-[optional linker sequence]-[domain C]-[optional linker sequence]-[domain A]; [NLS]-[optional linker sequence]-[domain C]-[optional linker sequence]-[domain B]-[optional linker sequence]-[domain A]; [domain C]-[optional linker sequence]-[domain B]-optional linker sequence]-[domain A ckase]-[optional linker sequence]-[NLS]; [domain C]-[optional linker sequence]-[domain A]-[optional linker sequence]-[domain B]-[optional linker sequence]-[NLS]; [NLS]-[optional linker sequence]-[domain C]-[optional linker sequence]-[domain A]-[optional linker sequence]-[domain B]; [NLS]-[optional linker sequence]-[domain A]-[optional linker sequence]-[domain C]-[optional linker sequence]-[domain B]; [domain A]-[optional linker sequence]-[domain C]-[optional linker sequence]-[domain B]-[optional linker sequence]-[NLS]; [NLS]-[optional linker sequence]-[domain A]-[optional linker sequence]-[domain B]-[optional linker sequence]-[domain C]; or [domain A]-[optional linker sequence]-[domain B]-[optional linker sequence]-[domain C]-[optional linker sequence]-[NLS].

### Nuclear Localization Signal

[0222] In various embodiments, the base editors disclosed herein further comprise one or more additional base editor elements, e.g., a nuclear localization signal(s), an inhibitor of base excision repair, and/or a heterologous protein domain.

[0223] In various embodiments, the base editors disclosed herein further comprise one or more, preferably, at least two nuclear localization signals. In certain embodiments, the base editors comprise at least two NLSs. In embodiments with at least two NLSs, the NLSs can be the same NLSs, or they can be different NLSs. In addition, the NLSs may be expressed as part of a fusion protein with the remaining portions of the base editors. The location of the NLS fusion can be at the N-terminus, the C-terminus, or within a sequence of a base editor (e.g., inserted between the encoded napDNAbp domain (e.g., Cas9) and a DNA nucleobase modification domain (e.g., an adenine deaminase)).

[0224] The NLSs may be any known NLS sequence in the art. The NLSs may also be any future-discovered NLSs for nuclear localization. The NLSs also may be any naturally-occurring NLS, or any non-naturally occurring NLS (e.g., an NLS with one or more desired mutations).

[0225] A nuclear localization signal or sequence (NLS) is an amino acid sequence that tags, designates, or otherwise marks a protein for import into the cell nucleus by nuclear transport. Typically, this signal consists of one or more short sequences of positively charged lysines or arginines exposed on the protein surface. Different nuclear localized proteins may share the same NLS. An NLS has the opposite function of a nuclear export signal (NES), which targets proteins out of the nucleus. A nuclear localization signal can also target the exterior surface of a cell. Thus, a single nuclear localization signal can direct the entity with which it is associated to the exterior of a cell and to the nucleus of a cell. Such sequences can be of any size and composition, for example, more than 25, 25, 15, 12, 10, 8, 7, 6, 5, or 4 amino acids, but will preferably comprise at least a four to eight amino acid sequence known to function as a nuclear localization signal (NLS).

[0226] The term “nuclear localization sequence” or “NLS” refers to an amino acid sequence that promotes import of a protein into the cell nucleus, for example, by nuclear transport. Nuclear localization sequences are known in the art and would be apparent to the skilled artisan. For example, NLS sequences are described in Plank et al., International PCT application PCT/EP2000/011690, filed Nov. 23, 2000, published as WO/2001/038547 on May 31, 2001, the contents of which are incorporated herein by reference. In some embodiments, an NLS comprises the amino acid sequence PKKKRKV (SEQ ID NO: 130), MDSLLMNRRKFLYQFKNVRWAKGRRETYLC (SEQ ID NO: 131), KRTADGSEFESPKKKRKV (SEQ ID NO: 132), or KRTADGSEFEPKKKRKV (SEQ ID NO: 133). In other embodiments, NLS comprises the amino acid sequences NLSKRPAAIKKAGQAKKKK (SEQ ID NO: 134), PAAKRVKLD (SEQ ID NO: 135), RQRRNELKRSF (SEQ ID NO: 136), NQSSNFGPMKGGNFGGRSSGPYGGGGQYFAKPRNQGGY (SEQ ID NO: 137).

[0227] In one aspect of the invention, a base editor may be modified with one or more nuclear localization signals (NLS), preferably at least two NLSs. In certain embodiments, the base editors are modified with two or more NLSs. The invention contemplates the use of any nuclear localization signal known in the art at the time of the invention, or any nuclear localization signal that is identified or otherwise made available in the state of the art after the time of the instant filing. A representative nuclear localization signal is a peptide sequence that directs the protein to the nucleus of the cell in which the sequence is expressed. A nuclear localization signal is predominantly basic, can be positioned almost anywhere in a protein's amino acid sequence, generally comprises a short sequence of four amino acids (Autieri & Agrawal, (1998) J. Biol. Chem. 273: 14731-37, incorporated herein by reference) to eight amino acids, and is typically rich in lysine and arginine residues (Magin et al., (2000) Virology 274: 11-16, incorporated herein by reference). Nuclear localization signals often comprise proline residues. A variety of nuclear localization signals have been identified and have been used to effect transport of biological molecules from the cytoplasm to the nucleus of a cell. See, e.g., Tinland et al., (1992) Proc. Natl. Acad. Sci. U.S.A. 89:7442-46; Moede et al., (1999) FEBS Lett. 461:229-34, which is incorporated by reference. Translocation is currently thought to involve nuclear pore proteins.

[0228] Most NLSs can be classified in three general groups: (i) a monopartite NLS exemplified by the SV40 large T antigen NLS (PKKKRKV (SEQ ID NO: 138)); (ii) a bipartite motif consisting of two basic domains separated by a variable number of spacer amino acids and exemplified by the Xenopus nucleoplasmin NLS (KRXXXXXXXXXXKKKL (SEQ ID NO: 139), where X is any amino acid); and (iii) noncanonical sequences such as M9 of the hnRNP Al protein, the influenza virus nucleoprotein NLS, and the yeast Gal4 protein NLS (Dingwall and Laskey, 1991).

[0229] Nuclear localization signals appear at various points in the amino acid sequences of proteins. NLS's have been identified at the N-terminus, the C-terminus, and in the central region of proteins. Thus, the specification provides base editors that may be modified with one or more NLSs at the C-terminus, the N-terminus, as well as at in internal region of the base editor. The residues of a longer sequence that do not function as component NLS residues should be selected so as not to interfere, for example tonically or sterically, with the nuclear localization signal itself. Therefore, although there are no strict limits on the composition of an NLS-comprising sequence, in practice, such a sequence can be functionally limited in length and composition.

[0230] The present disclosure contemplates any suitable means by which to modify a base editor to include one or more NLSs. In one aspect, the base editors can be engineered to express a base editor protein that is translationally fused at its N-terminus or its C-terminus (or both) to one or more NLSs, i.e., to form a base editor-NLS fusion construct. In other embodiments, the base editor-encoding nucleotide sequence can be genetically modified to incorporate a reading frame that encodes one or more NLSs in an internal region of the encoded base editor. In addition, the NLSs may include various amino acid linkers or spacer regions encoded between the base editor and the N-terminally, C-terminally, or internally-attached NLS amino acid sequence, e.g, and in the central region of proteins. Thus, the present disclosure also provides for nucleotide constructs, vectors, and host cells for expressing fusion proteins that comprise a base editor and one or more NLSs.

[0231] The base editors described herein may also comprise nuclear localization signals which are linked to a base editor through one or more linkers, e.g., and polymeric, amino acid, nucleic acid, polysaccharide, chemical, or nucleic acid linker element. The linkers within the contemplated scope of the disclosure are not intended to have any limitations and can be any suitable type of molecule (e.g., polymer, amino acid, polysaccharide, nucleic acid, lipid, or any synthetic chemical linker domain) and be joined to the base editor by any suitable strategy that effectuates forming a bond (e.g., covalent linkage, hydrogen bonding) between the base editor and the one or more NLSs.

[0232] The base editors described herein also may include one or more additional elements. In certain embodiments, an additional element may comprise an effector of base repair.

[0233] In certain embodiments, the base editors described herein may comprise an inhibitor of base excision repair. The term “inhibitor of base excision repair” or “iBER” refers to a protein that is capable of inhibiting the activity of a nucleic acid repair enzyme, for example a base excision repair enzyme. Mammalian cells clear 8-oxoadenine lesions that arise naturally from oxidative DNA damage by action of thymine-DNA glycosylase (TDG), which hydrolytically cleaves the glycosidic bond of the damaged base, leaving behind an abasic site. Abasic sites are excised by AP lyase during the base excision repair process, introducing a break in the modified DNA strand. If this occurs before mismatch repair machinery locates the nick left by an nCas9 domain, as in the fusion proteins disclosed herein, in the non-edited strand, a double strand break is generated, which could lead to undesired indels during repair. Competitive base excision repair may interfere with 8-oxoadenine-mediated base editing. Accordingly, in exemplary embodiments, an iBER is fused to the fusion proteins disclosed herein, to compete for binding of the 8-oxoadenine lesion with active, endogenous excision repair enzymes, preventing or slowing base excision repair.

[0234] In some embodiments, the iBER is an inhibitor of 8-oxoadenine base excision repair. Exemplary iBERs include OGG inhibitors, MUG inhibitors, and TDG inhibitors. Exemplary iBERs include inhibitors of hOGGI, hTDG, ecMUG, APEl, Endo III, Endo IV, Endo V, Endo VIII, Fpg, hNEIL1, T7 EndoI, T4PDG, UDG, hSMUG1, and hAAG. In some embodiments, the iBER may be a catalytically inactive OGG, a catalytically inactive TDG, a catalytically inactive MUG, or small molecule or peptide inhibitor of OGG, TDG, or MUG, or a variant thereof.

[0235] In particular embodiments, the iBER is a catalytically inactive TDG. Exemplary catalytically inactive TDGs include mutagenized variants of wild-type TDG (SEQ ID NO: 140) that bind DNA nucleobases, including 8-oxoadenine, but lack DNA glycosylase activity.

TDG (human) (wild-type)
(SEQ ID NO: 140)
MEAENAGSYSLQQAQAFYTFPFQQLMAEAPNMAVVNEQQMPEEVPAPAP
AQEPVQEAPKGRKRKPRTTEPKQPVEPKKPVESKKSGKSAKSKEKQEKI
TDTFKVKRKVDRFNGVSEAELLTKTLPDILTFNLDIVIIGINPGLMAAY
KGHHYPGPGNHFWKCLFMSGLSEVQLNHMDDHTLPGKYGIGFTNMVERT
TPGSKDLSSKEFREGGRILVQKLQKYQPRIAVFNGKCIYEIFSKEVFGV
KVKNLEFGLQPHKIPDTETLCYVMPSSSARCAQFPRAQDKVHYYIKLKD
LRDQLKGIERNMDVQEVQYTFDLQLAQEDAKKMAVKEEKYDPGYEAAYG
GAYGENPCSSEPCGFSSNGLIESVELRGESAFSGIPNGQWMTQSFTDQI
PSFSNHCGTQEQEEESHA

[0236] Exemplary catalytically inactive MUGs include mutagenized variants of wild-type MUG (SEQ ID NO: 141) that bind DNA nucleobases, including 8-oxoadenine, but lack DNA glycosylase activity.

E. coli MUG (wild-type)
(SEQ ID NO: 141)
MVEDILAPGLRVVFCGINPGLSSAGTGFPFAHPANRFWKVIYQAGFTDR
QLKPQEAQHLLDYRCGVTKLVDRPTVQANEVSKQELHAGGRKLIEKIED
YQPQALAILGKQAYEQGFSQRGAQWGKQTLTIGSTQIWVLPNPSGLSRV
SLEKLVEAYRELDQALVVRGR

[0237] Some exemplary suitable inhibitors of base excision repair, that may be fused to Cas9 domains according to embodiments of this disclosure are provided below. An exemplary catalytically inactive hTDG is an N140A mutant of SEQ ID NO: 140, shown below as SEQ ID NO: 142. Analogously, an exemplary catalytically inactive ecMUG is an N18A mutant of SEQ ID NO: 141, shown below as SEQ ID NO: 143.

Catalytically inactive TDG (human)
(SEQ ID NO: 142)
MEAENAGSYSLQQAQAFYTFPFQQLMAEAPNMAVVNEQQMPEEVPAPAP
AQEPVQEAPKGRKRKPRTTEPKQPVEPKKPVESKKSGKSAKSKEKQEKI
TDTFKVKRKVDRFNGVSEAELLTKTLPDILTFNLDIVIIGIAPGLMAAY
KGHHYPGPGNHFWKCLFMSGLSEVQLNHMDDHTLPGKYGIGFTNMVERT
TPGSKDLSSKEFREGGRILVQKLQKYQPRIAVFNGKCIYEIFSKEVFGV
KVKNLEFGLQPHKIPDTETLCYVMPSSSARCAQFPRAQDKVHYYIKLKD
LRDQLKGIERNMDVQEVQYTFDLQLAQEDAKKMAVKEEKYDPGYEAAYG
GAYGENPCSSEPCGFSSNGLIESVELRGESAFSGIPNGQWMTQSFTDQI
PSFSNHCGTQEQEEESHA
Catalytically inactive E. coli MUG
(SEQ ID NO: 143)
MVEDILAPGLRVVFCGIAPGLSSAGTGFPFAHPANRFWKVIYQAGFTDR
QLKPQEAQHLLDYRCGVTKLVDRPTVQANEVSKQELHAGGRKLIEKIED
YQPQALAILGKQAYEQGFSQRGAQWGKQTLTIGSTQIWVLPNPSGLSRV
SLEKLVEAYRELDQALVVRG

[0238] Other exemplary iBERs comprise variants with at least 80%, at least 85%, at least 90%, at least 95%, or at least 99% sequence identity to wild-type hTDG and ecMUG, above. Other exemplary iBERs comprise variants with at least 80%, at least 85%, at least 90%, at least 95%, or at least 99% sequence identity to wild-type hOGGI, UDG, hSMUG1, and hAAG.

[0239] In some embodiments, the base editor described herein may comprise one or more protein domains (e.g., about or more than about 1, 2, 3, 4, 5, 6, 7, 8, 9, 10, or more domains in addition to the base editor components). A base editor may comprise any additional protein sequence, and optionally a linker sequence between any two domains. Examples of protein domains that may be fused to a base editor or component thereof (e.g., the napDNAbp domain, the nucleobase modification domain, or the NLS domain) include, without limitation, epitope tags and reporter gene sequences. Non-limiting examples of epitope tags include histidine (His) tags, V5 tags, FLAG tags, influenza hemagglutinin (HA) tags, Myc tags, VSV-G tags, and thioredoxin (Trx) tags. Examples of reporter genes include, but are not limited to, glutathione-5-transferase (GST), horseradish peroxidase (HRP), chloramphenicol acetyltransferase (CAT), beta-galactosidase, beta-glucuronidase, luciferase, green fluorescent protein (GFP), HcRed, DsRed, cyan fluorescent protein (CFP), yellow fluorescent protein (YFP), and autofluorescent proteins including blue fluorescent protein (BFP). A base editor may be fused to a gene sequence encoding a protein or a fragment of a protein that bind DNA molecules or bind other cellular molecules, including, but not limited to, maltose binding protein (MBP), S-tag, Lex A DNA binding domain (DBD) fusions, GAL4 DNA binding domain fusions, and herpes simplex virus (HSV) BP16 protein fusions. Additional domains that may form part of a base editor are described in US Patent Publication No. 2011/0059502, published Mar. 10, 2011, and incorporated herein by reference in its entirety.

[0240] In an aspect of the invention, a reporter gene which includes, but is not limited to, glutathione-5-transferase (GST), horseradish peroxidase (HRP), chloramphenicol acetyltransferase (CAT) beta-galactosidase, beta-glucuronidase, luciferase, green fluorescent protein (GFP), HcRed, DsRed, cyan fluorescent protein (CFP), yellow fluorescent protein (YFP), and autofluorescent proteins including blue fluorescent protein (BFP), may be introduced into a cell to encode a gene product which serves as a marker by which to measure the alteration or modification of expression of the gene product. In a further embodiment of the invention, the DNA molecule encoding the gene product may be introduced into the cell via a vector. In certain embodiments of the invention the gene product is luciferase. In a further embodiment of the invention the expression of the gene product is decreased.

[0241] Other exemplary features that may be present are tags that are useful for solubilization, purification, or detection of the fusion proteins. Suitable protein tags provided herein include, but are not limited to, biotin carboxylase carrier protein (BCCP) tags, myc-tags, calmodulin-tags, FLAG-tags, hemagglutinin (HA)-tags, bgh-PolyA tags, polyhistidine tags, and also referred to as histidine tags or His-tags, maltose binding protein (MBP)-tags, nus-tags, glutathione-S-transferase (GST)-tags, green fluorescent protein (GFP)-tags, thioredoxin-tags, S-tags, Softags (e.g., Softag 1, Softag 3), strep-tags, biotin ligase tags, FlAsH tags, V5 tags, and SBP-tags. Additional suitable sequences will be apparent to those of skill in the art. In some embodiments, the fusion protein comprises one or more His tags.

### Guide Sequence (e.g., a Guide RNA)

[0242] In various embodiments, the transversion base editors may be complexed, bound, or otherwise associated with (e.g., via any type of covalent or non-covalent bond) one or more guide sequences, i.e., the sequence which becomes associated or bound to the base editor and directs its localization to a specific target sequence having complementarity to the guide sequence or a portion thereof. The particular design embodiments of a guide sequence will depend upon the nucleotide sequence of a genomic target site of interest (i.e., the desired site to be edited) and the type of napDNAbp (e.g., type of Cas protein) present in the base editor, among other factors, such as PAM sequence locations, percent G/C content in the target sequence, the degree of microhomology regions, secondary structures, etc.

[0243] In general, a guide sequence is any polynucleotide sequence having sufficient complementarity with a target polynucleotide sequence to hybridize with the target sequence and direct sequence-specific binding of a napDNAbp (e.g., a Cas9, Cas9 homolog, or Cas9 variant) to the target sequence. In some embodiments, the degree of complementarity between a guide sequence and its corresponding target sequence, when optimally aligned using a suitable alignment algorithm, is about or more than about 50%, 60%, 75%, 80%, 85%, 90%, 95%, 97.5%, 99%, or more. Optimal alignment may be determined with the use of any suitable algorithm for aligning sequences, non-limiting example of which include the Smith-Waterman algorithm, the Needleman-Wunsch algorithm, algorithms based on the Burrows-Wheeler Transform (e.g., the Burrows Wheeler Aligner), ClustalW, Clustal X, BLAT, Novoalign (Novocraft Technologies, ELAND (Illumina, San Diego, Calif.), SOAP (available at soap.genomics.org.cn), and Maq (available at maq.sourceforge.net). In some embodiments, a guide sequence is about or more than about 5, 10, 11, 12, 13, 14, 15, 16, 17, 18, 19, 20, 21, 22, 23, 24, 25, 26, 27, 28, 29, 30, 35, 40, 45, 50, 75, or more nucleotides in length.

[0244] In some embodiments, a guide sequence is less than about 75, 50, 45, 40, 35, 30, 25, 20, 15, 12, or fewer nucleotides in length. The ability of a guide sequence to direct sequence-specific binding of a base editor to a target sequence may be assessed by any suitable assay. For example, the components of a base editor, including the guide sequence to be tested, may be provided to a host cell having the corresponding target sequence, such as by transfection with vectors encoding the components of a base editor disclosed herein, followed by an assessment of preferential cleavage within the target sequence, such as by Surveyor assay as described herein. Similarly, cleavage of a target polynucleotide sequence may be evaluated in a test tube by providing the target sequence, components of a base editor, including the guide sequence to be tested and a control guide sequence different from the test guide sequence, and comparing binding or rate of cleavage at the target sequence between the test and control guide sequence reactions. Other assays are possible, and will occur to those skilled in the art.

[0245] A guide sequence may be selected to target any target sequence. In some embodiments, the target sequence is a sequence within a genome of a cell. Exemplary target sequences include those that are unique in the target genome. For example, for the S. pyogenes Cas9, a unique target sequence in a genome may include a Cas9 target site of the form MMMMMMMMNNNNNNNNNNNNXGG (SEQ ID NO: 144) where NNNNNNNNNNNNXGG (N is A, G, T, or C; and X can be anything) (SEQ ID NO: 145) has a single occurrence in the genome. A unique target sequence in a genome may include an S. pyogenes Cas9 target site of the form MMMMMMMMMNNNNNNNNNNNXGG (SEQ ID NO: 146) where NNNNNNNNNNNXGG (N is A, G, T, or C; and X can be anything) (SEQ ID NO: 147) has a single occurrence in the genome. For the S. thermophilus CRISPR1Cas9, a unique target sequence in a genome may include a Cas9 target site of the form MMMMMMMMNNNNNNNNNNNNXXAGAAW (SEQ ID NO: 148) where NNNNNNNNNNNNXXAGAAW (N is A, G, T, or C; X can be anything; and W is A or T) (SEQ ID NO: 149) has a single occurrence in the genome. A unique target sequence in a genome may include an S. thermophilus CRISPR 1 Cas9 target site of the form MMMMMMMMMNNNNNNNNNNNXXAGAAW (SEQ ID NO: 150) where NNNNNNNNNNNXXAGAAW (N is A, G, T, or C; X can be anything; and W is A or T) (SEQ ID NO: 151) has a single occurrence in the genome. For the S. pyogenes Cas9, a unique target sequence in a genome may include a Cas9 target site of the form MMMMMMMMNNNNNNNNNNNNXGGXG (SEQ ID NO: 152) where NNNNNNNNNNNNXGGXG (N is A, G, T, or C; and X can be anything) (SEQ ID NO: 153) has a single occurrence in the genome. A unique target sequence in a genome may include an S. pyogenes Cas9 target site of the form MMMMMMMMMNNNNNNNNNNNXGGXG (SEQ ID NO: 154) where NNNNNNNNNNNXGGXG (N is A, G, T, or C; and X can be anything) (SEQ ID NO: 155) has a single occurrence in the genome. In each of these sequences “M” may be A, G, T, or C, and need not be considered in identifying a sequence as unique.

[0246] In some embodiments, a guide sequence is selected to reduce the degree of secondary structure within the guide sequence. Secondary structure may be determined by any suitable polynucleotide folding algorithm. Some programs are based on calculating the minimal Gibbs free energy. An example of one such algorithm is mFold, as described by Zuker & Stiegler (Nucleic Acids Res. 9 (1981), 133-148). Another example folding algorithm is the online webserver RNAfold, developed at Institute for Theoretical Chemistry at the University of Vienna, using the centroid structure prediction algorithm (see, e.g., A. R. Gruber et al., 2008, Cell 106(1): 23-24; and PA Carr & GM Church, 2009, Nature Biotechnology 27(12): 1151-62). Additional algorithms may be found in Chuai, G. et al., DeepCRISPR: optimized CRISPR guide RNA design by deep learning, Genome Biol. 19:80 (2018), and U.S. application Ser. No. 61/836,080 and U.S. Pat. No. 8,871,445, issued Oct. 28, 2014, the entireties of each of which are incorporated herein by reference.

[0247] In general, a tracr mate sequence includes any sequence that has sufficient complementarity with a tracr sequence to promote one or more of: (1) excision of a guide sequence flanked by tracr mate sequences in a cell containing the corresponding tracr sequence; and (2) formation of a complex at a target sequence, wherein the complex comprises the tracr mate sequence hybridized to the tracr sequence. In general, degree of complementarity is with reference to the optimal alignment of the tracr mate sequence and tracr sequence, along the length of the shorter of the two sequences. Optimal alignment may be determined by any suitable alignment algorithm, and may further account for secondary structures, such as self-complementarity within either the tracr sequence or tracr mate sequence. In some embodiments, the degree of complementarity between the tracr sequence and tracr mate sequence along the length of the shorter of the two when optimally aligned is about or more than about 25%, 30%, 40%, 50%, 60%, 70%, 80%, 90%, 95%, 97.5%, 99%, or higher. In some embodiments, the tracr sequence is about or more than about 5, 6, 7, 8, 9, 10, 11, 12, 13, 14, 15, 16, 17, 18, 19, 20, 25, 30, 40, 50, or more nucleotides in length. In some embodiments, the tracr sequence and tracr mate sequence are contained within a single transcript, such that hybridization between the two produces a transcript having a secondary structure, such as a hairpin. Preferred loop forming sequences for use in hairpin structures are four nucleotides in length, and most preferably have the sequence GAAA. However, longer or shorter loop sequences may be used, as may alternative sequences. The sequences preferably include a nucleotide triplet (for example, AAA), and an additional nucleotide (for example C or G). Examples of loop forming sequences include CAAA and AAAG. In an embodiment of the invention, the transcript or transcribed polynucleotide sequence has at least two or more hairpins. In certain embodiments, the transcript has two, three, four or five hairpins. In a further embodiment of the invention, the transcript has at most five hairpins. In some embodiments, the single transcript further includes a transcription termination sequence; preferably this is a polyT sequence, for example six T nucleotides. Further non-limiting examples of single polynucleotides comprising a guide sequence, a tracr mate sequence, and a tracr sequence are as follows (listed 5′ to 3′), where “N” represents a base of a guide sequence, the first block of lower case letters represent the tracr mate sequence, and the second block of lower case letters represent the tracr sequence, and the final poly-T sequence represents the transcription terminator:

(1) NNNNNNNNgtttttgtactctcaagatttaGAAAtaaatcttgcagaagctacaaagataaggctt catgccgaaatcaacaccctgtcattttatggcagggtgttttcgttatttaaTTTTTT (SEQ ID NO: 156); (2) NNNNNNNNNNNNNNNNNNgtttttgtactctcaGAAAtgcagaagctacaaagataaggcttcatgccgaaatca acaccctgtcattttatggcagggtgttttcgttatttaaTTTTTT (SEQ ID NO: 157); (3) NNNNNNNNNNNNNNNNNNNNgtttttgtactctcaGAAAtgcagaagctacaaagataaggcttcatgccgaaatca acaccctgtcattttatggcagggtgtTTTTT (SEQ ID NO: 158); (4) NNNNNNNNNNNNNNNNNNNNgttttagagctaGAAAtagcaagttaaaataaggctagtccgttatcaacttgaaaa agtggcaccgagtcggtgcTTTTTT (SEQ ID NO: 159); (5) NNNNNNNNNNNNNNNNNNNNgttttagagctaGAAATAGcaagttaaaataaggctagtccgttatcaacttgaa aaagtgTTTTTTT (SEQ ID NO: 160); and (6) NNNNNNNNNNNNNNNNNNNNgttttagagctagAAATAGcaagttaaaataaggctagtccgttatcaTTTTT TTT (SEQ ID NO: 161). In some embodiments, sequences (1) to (3) are used in combination with Cas9 from S. thermophilus CRISPR1. In some embodiments, sequences (4) to (6) are used in combination with Cas9 from S. pyogenes. In some embodiments, the tracr sequence is a separate transcript from a transcript comprising the tracr mate sequence.

[0248] It will be apparent to those of skill in the art that in order to target any of the fusion proteins comprising a Cas9 domain and an DNA nucleobase modification domain, as disclosed herein, to a target site, e.g., a site comprising a point mutation to be edited, it is typically necessary to co-express the fusion protein together with a guide RNA, e.g., an sgRNA. As explained in more detail elsewhere herein, a guide RNA typically comprises a tracrRNA framework allowing for Cas9 binding, and a guide sequence, which confers sequence specificity to the Cas9:nucleic acid editing enzyme/domain fusion protein.

[0249] In some embodiments, the guide RNA comprises a structure 5′-[guide sequence]-guuuuagagcuagaaauagcaaguuaaaauaaggcuaguccguuaucaacuugaaaaaguggcaccgagucggugcuuuuu-3′ (SEQ ID NO: 162), wherein the guide sequence comprises a sequence that is complementary to the target sequence. See U.S. Publication No. 2015/0166981, published Jun. 18, 2015, the disclosure of which is incorporated by reference herein in its entirety. The guide sequence is typically 20 nucleotides long. The sequences of suitable guide RNAs for targeting Cas9:nucleic acid editing enzyme/domain fusion proteins to specific genomic target sites will be apparent to those of skill in the art based on the instant disclosure. Such suitable guide RNA sequences typically comprise guide sequences that are complementary to a nucleic sequence within 50 nucleotides upstream or downstream of the target nucleotide to be edited. Some exemplary guide RNA sequences suitable for targeting any of the provided fusion proteins to specific target sequences are provided herein. Additional guide sequences are well known in the art and may be used with the base editors described herein. Additional exemplary guide sequences are disclosed in, for example, Jinek M., et al., Science 337:816-821(2012); Mali P, Esvelt K M & Church G M (2013) Cas9 as a versatile tool for engineering biology, Nature Methods, 10, 957-963; Li J F et al., (2013) Multiplex and homologous recombination-mediated genome editing in Arabidopsis and Nicotiana benthamiana using guide RNA and Cas9, Nature Biotechnology, 31, 688-691; Hwang, W. Y. et al., Efficient genome editing in zebrafish using a CRISPR-Cas system, Nature Biotechnology 31, 227-229 (2013); Cong L et al., (2013) Multiplex genome engineering using CRIPSR/Cas systems, Science, 339, 819-823; Cho S W et al., (2013) Targeted genome engineering in human cells with the Cas9 RNA-guided endonuclease, Nature Biotechnology, 31, 230-232; Jinek, M. et al., RNA-programmed genome editing in human cells, eLife 2, e00471 (2013); Dicarlo, J. E. et al., Genome engineering in Saccharomyces cerevisiae using CRISPR-Cas systems. Nucleic Acid Res. (2013); Briner A E et al., (2014) Guide RNA functional modules direct Cas9 activity and orthogonality, Mol Cell, 56, 333-339, the entire contents of each of which are herein incorporated by reference.

### Increasing Expression

[0250] The invention relates in various aspects to methods of making the disclosed base editors by various modes of manipulation that include, but are not limited to, codon optimization of one or more domains of the base editors (e.g., of an adenine deaminase) to achieve greater expression levels in a cell. The base editors contemplated herein can include modifications that result in increased expression through codon optimization and ancestral reconstruction analysis.

[0251] In some embodiments, the base editors (or a component thereof) is codon optimized for expression in particular cells, such as eukaryotic cells. The eukaryotic cells may be those of or derived from a particular organism, such as a mammal, including, but not limited to, human, mouse, rat, rabbit, dog, or non-human primate. In general, codon optimization refers to a process of modifying a nucleic acid sequence for enhanced expression in the host cells of interest by replacing at least one codon (e.g., about or more than about 1, 2, 3, 4, 5, 10, 15, 20, 25, 50, or more codons) of the native sequence with codons that are more frequently or most frequently used in the genes of that host cell while maintaining the native amino acid sequence. Various species exhibit particular bias for certain codons of a particular amino acid. Codon bias (differences in codon usage between organisms) often correlates with the efficiency of translation of messenger RNA (mRNA), which is in turn believed to be dependent on, among other things, the properties of the codons being translated and the availability of particular transfer RNA (tRNA) molecules. The predominance of selected tRNAs in a cell is generally a reflection of the codons used most frequently in peptide synthesis. Accordingly, genes can be tailored for optimal gene expression in a given organism based on codon optimization. Codon usage tables are readily available, for example, at the “Codon Usage Database,” and these tables can be adapted in a number of ways. See Nakamura, Y., et al. “Codon usage tabulated from the international DNA sequence databases: status for the year 2000” Nucl. Acids Res. 28:292 (2000). Computer algorithms for codon optimizing a particular sequence for expression in a particular host cell are also available, such as Gene Forge (Aptagen; Jacobus, PA), are also available. In some embodiments, one or more codons (e.g., 1, 2, 3, 4, 5, 10, 15, 20, 25, 50, or more, or all codons) in a sequence encoding a CRISPR enzyme correspond to the most frequently used codon for a particular amino acid. In some embodiments, nucleic acid constructs are codon-optimized for expression in HEK293T cells. In some embodiments, nucleic acid constructs are codon-optimized for expression in human cells.

[0252] In other embodiments, the base editors of the invention have improved expression (as compared to non-modified or state of the art counterpart editors) as a result of ancestral sequence reconstruction analysis. Ancestral sequence reconstruction (ASR) is the process of analyzing modern sequences within an evolutionary/phylogenetic context to infer the ancestral sequences at particular nodes of a tree. These ancient sequences are most often then synthesized, recombinantly expressed in laboratory microorganisms or cell lines, and then characterized to reveal the ancient properties of the extinct biomolecules. This process has produced tremendous insights into the mechanisms of molecular adaptation and functional divergence. Despite such insights, a major criticism of ASR is the general inability to benchmark accuracy of the implemented algorithms. It is difficult to benchmark ASR for many reasons. Notably, genetic material is not preserved in fossils on a long enough time scale to satisfy most ASR studies (many millions to billions of years ago), and it is not yet physically possible to travel back in time to collect samples. Reference can be made to Cai et al., “Reconstruction of ancestral protein sequences and its applications,” BMC Evolutionary Biology 2004, 4:33; and Zakas et al., “Enhancing the pharmaceutical properties of protein drugs by ancestral sequence reconstruction,” Nature Biotechnology, 35-37 (2017), each of which are incorporated herein by reference.

[0253] There are many software packages available which can perform ancestral state reconstruction. Generally, these software packages have been developed and maintained through the efforts of scientists in related fields and released under free software licenses. The following list is not meant to be a comprehensive itemization of all available packages, but provides a representative sample of the extensive variety of packages that implement methods of ancestral reconstruction with different strengths and features: PAML (Phylogenetic Analysis by Maximum Likelihood, available at //abacus.gene.ucl.ac.uk/software/paml.html), BEAST (Bayesian evolutionary analysis by sampling trees, available at //www.beast2.org/wiki/index.php/Main_Page), and Diversitree (FitzJohn RG, 2012. Diversitree: comparative phylogenetic analyses of diversification in R. Methods in Ecology and Evolution), and HyPHy (Hypothesis testing using phylogenies, available at //hyphy.org/w/index.php/Main_Page).

[0254] The above description is meant to be non-limiting with regard to making base editors having increased expression, and thereby increase editing efficiencies.

### Increasing Base Editor Efficiencies

[0255] Some embodiments of the disclosure are based on the recognition that any of the base editors provided herein are capable of modifying a specific nucleobase without generating a significant proportion of indels. An “indel”, as used herein, refers to the insertion or deletion of a nucleobase within a nucleic acid. Such insertions or deletions can lead to frame shift mutations within a coding region of a gene. In some embodiments, it is desirable to generate base editors that efficiently modify (e.g., oxidize) a specific nucleotide within a nucleic acid, without generating a large number of insertions or deletions (i.e., indels) in the nucleic acid. In certain embodiments, any of the base editors provided herein are capable of generating a greater proportion of intended modifications (e.g., point mutations) versus indels. In some embodiments, the base editors provided herein are capable of generating a ratio of intended point mutations to indels that is greater than 1:1. In some embodiments, the base editors provided herein are capable of generating a ratio of intended point mutations to indels that is at least 1.5:1, at least 2:1, at least 2.5:1, at least 3:1, at least 3.5:1, at least 4:1, at least 4.5:1, at least 5:1, at least 5.5:1, at least 6:1, at least 6.5:1, at least 7:1, at least 7.5:1, at least 8:1, at least 10:1, at least 12:1, at least 15:1, at least 20:1, at least 25:1, at least 30:1, at least 40:1, at least 50:1, at least 100:1, at least 200:1, at least 300:1, at least 400:1, at least 500:1, at least 600:1, at least 700:1, at least 800:1, at least 900:1, or at least 1000:1, or more. The number of intended mutations and indels may be determined using any suitable method, for example the methods used in the below Examples. In some embodiments, to calculate indel frequencies, sequencing reads are scanned for exact matches to two 10-bp sequences that flank both sides of a window in which indels might occur. If no exact matches are located, the read is excluded from analysis. If the length of this indel window exactly matches the reference sequence the read is classified as not containing an indel. If the indel window is two or more bases longer or shorter than the reference sequence, then the sequencing read is classified as an insertion or deletion, respectively.

[0256] In some embodiments, the base editors provided herein are capable of limiting formation of indels in a region of a nucleic acid. In some embodiments, the region is at a nucleotide targeted by a base editor or a region within 2, 3, 4, 5, 6, 7, 8, 9, or 10 nucleotides of a nucleotide targeted by a base editor. In some embodiments, any of the base editors provided herein are capable of limiting the formation of indels at a region of a nucleic acid to less than 1%, less than 1.5%, less than 2%, less than 2.5%, less than 3%, less than 3.5%, less than 4%, less than 4.5%, less than 5%, less than 6%, less than 7%, less than 8%, less than 9%, less than 10%, less than 12%, less than 15%, or less than 20%. The number of indels formed at a nucleic acid region may depend on the amount of time a nucleic acid (e.g., a nucleic acid within the genome of a cell) is exposed to a base editor. In some embodiments, a number or proportion of indels is determined after at least 1 hour, at least 2 hours, at least 6 hours, at least 12 hours, at least 24 hours, at least 36 hours, at least 48 hours, at least 3 days, at least 4 days, at least 5 days, at least 7 days, at least 10 days, or at least 14 days of exposing a nucleic acid (e.g., a nucleic acid within the genome of a cell) to a base editor.

[0257] Some embodiments of the disclosure are based on the recognition that any of the base editors provided herein are capable of efficiently generating an intended mutation, such as a point mutation, in a nucleic acid (e.g., a nucleic acid within a genome of a subject) without generating a significant number of unintended mutations, such as unintended point mutations. In some embodiments, an intended mutation is a mutation that is generated by a specific base editor bound to a gRNA, specifically designed to generate the intended mutation. In some embodiments, the intended mutation is a mutation associated with a disease, disorder, or condition. In some embodiments, the intended mutation is an adenine (A) to cytosine (C) point mutation associated with a disease, disorder, or condition. In some embodiments, the intended mutation is a thymine (T) to guanine (G) point mutation associated with a disease, disorder, or condition. In some embodiments, the intended mutation is an adenine (A) to cytosine (C) point mutation within the coding region of a gene. In some embodiments, the intended mutation is a thymine (T) to guanine (G) point mutation within the coding region of a gene. In some embodiments, the intended mutation is a point mutation that generates a stop codon, for example, a premature stop codon within the coding region of a gene. In some embodiments, the intended mutation is a mutation that eliminates a stop codon. In some embodiments, the intended mutation is a mutation that alters the splicing of a gene. In some embodiments, the intended mutation is a mutation that alters the regulatory sequence of a gene (e.g., a gene promotor or gene repressor). In some embodiments, any of the base editors provided herein are capable of generating a ratio of intended mutations to unintended mutations (e.g., intended point mutations:unintended point mutations) that is greater than 1:1. In some embodiments, any of the base editors provided herein are capable of generating a ratio of intended mutations to unintended mutations (e.g., intended point mutations:unintended point mutations) that is at least 1.5:1, at least 2:1, at least 2.5:1, at least 3:1, at least 3.5:1, at least 4:1, at least 4.5:1, at least 5:1, at least 5.5:1, at least 6:1, at least 6.5:1, at least 7:1, at least 7.5:1, at least 8:1, at least 10:1, at least 12:1, at least 15:1, at least 20:1, at least 25:1, at least 30:1, at least 40:1, at least 50:1, at least 100:1, at least 150:1, at least 200:1, at least 250:1, at least 500:1, or at least 1000:1, or more.

[0258] Some embodiments of the disclosure are based on the recognition that the formation of indels in a region of a nucleic acid may be limited by nicking the non-edited strand opposite to the strand in which edits are introduced. This nick serves to direct mismatch repair machinery to the non-edited strand, ensuring that the chemically modified nucleobase is not interpreted as a lesion by the machinery. This nick may be created by the use of an nCas9. The methods provided in this disclosure comprise cutting (or nicking) the non-edited strand of the double-stranded DNA, for example, wherein the one strand comprises the T of the target A:T nucleobase pair. It should be appreciated that the characteristics of the base editors described in the “Editing DNA or RNA” section, herein, may be applied to any of the fusion proteins, or methods of using the fusion proteins provided herein.

### Vectors and Reagents

[0259] Several embodiments of the making and using of the base editors of the invention relate to vector systems comprising one or more vectors, or vectors as such. Vectors may be designed to clone and/or express the base editors as disclosed herein. Vectors may also be designed to clone and/or express one or more gRNAs having complementarity to the target sequence, as disclosed herein. Vectors may also be designed to transfect the base editors and gRNAs of the disclosure into one or more cells, e.g., a target diseased eukaryotic cell for treatment with the base editor systems and methods disclosed herein.

[0260] Vectors can be designed for expression of base editor transcripts (e.g., nucleic acid transcripts, proteins, or enzymes) in prokaryotic or eukaryotic cells. For example, base editor transcripts can be expressed in bacterial cells such as Escherichia coli, insect cells (using baculovirus expression vectors), yeast cells, or mammalian cells. Suitable host cells are discussed further in Goeddel, Gene Expression Technology: Methods in Enzymology 185, Academic Press. San Diego, Calif. (1990). Alternatively, expression vectors encoding one or more base editors described herein can be transcribed and translated in vitro, for example using T7 promoter regulatory sequences and T7 polymerase.

[0261] Vectors may be introduced and propagated in prokaryotic cells. In some embodiments, a prokaryote is used to amplify copies of a vector to be introduced into a eukaryotic cell or as an intermediate vector in the production of a vector to be introduced into a eukaryotic cell (e.g., amplifying a plasmid as part of a viral vector packaging system). In some embodiments, a prokaryote is used to amplify copies of a vector and express one or more nucleic acids, such as to provide a source of one or more proteins for delivery to a host cell or host organism. Expression of proteins in prokaryotes is most often carried out in Escherichia coli with vectors containing constitutive or inducible promoters directing the expression of either fusion or non-fusion proteins.

[0262] Fusion expression vectors also may be used to express the base editors of the disclosure. Such vectors generally add a number of amino acids to a protein encoded therein, such as to the amino terminus of the recombinant protein. Such fusion vectors may serve one or more purposes, such as: (i) to increase expression of a recombinant protein; (ii) to increase the solubility of a recombinant protein; and (iii) to aid in the purification of a recombinant protein by acting as a ligand in affinity purification. Often, in fusion expression vectors, a proteolytic cleavage site is introduced at the junction of the fusion domain and the recombinant protein to enable separation of the recombinant protein from the fusion domain subsequent to purification of the fusion protein. Such enzymes, and their cognate recognition sequences, include Factor Xa, thrombin and enterokinase. Example fusion expression vectors include pGEX (Pharmacia Biotech Inc; Smith and Johnson, 1988. Gene 67: 31-40), pMAL (New England Biolabs, Beverly, Mass.) and pRIT5 (Pharmacia, Piscataway, N.J.) that fuse glutathione S-transferase (GST), maltose E binding protein, or protein A, respectively, to the target recombinant protein.

[0263] Examples of suitable inducible non-fusion E. coli expression vectors include pTrc (Amrann et al., (1988) Gene 69:301-315) and pET 11d (Studier et al., Gene Expression Technology: Methods in Enzymology 185, Academic Press, San Diego, Calif. (1990) 60-89).

[0264] In some embodiments, a vector is a yeast expression vector for expressing the base editors described herein. Examples of vectors for expression in yeast Saccharomyces cerivisae include pYepSec1 (Baldari, et al., 1987. EMBO J. 6: 229-234), pMFa (Kuijan and Herskowitz, 1982. Cell 30: 933-943), pJRY88 (Schultz et al., 1987. Gene 54: 113-123), pYES2 (Invitrogen Corporation, San Diego, Calif.), and picZ (InVitrogen Corp, San Diego, Calif.).

[0265] In some embodiments, a vector drives protein expression in insect cells using baculovirus expression vectors. Baculovirus vectors available for expression of proteins in cultured insect cells (e.g., SF9 cells) include the pAc series (Smith, et al., 1983. Mol. Cell. Biol. 3: 2156-2165) and the pVL series (Lucklow and Summers, 1989. Virology 170: 31-39).

[0266] In some embodiments, a vector is capable of driving expression of one or more sequences in mammalian cells using a mammalian expression vector. Examples of mammalian expression vectors include pCDM8 (Seed, 1987. Nature 329: 840) and pMT2PC (Kaufman, et al., 1987. EMBO J. 6: 187-195). When used in mammalian cells, the expression vector's control functions are typically provided by one or more regulatory elements. For example, commonly used promoters are derived from polyoma, adenovirus 2, cytomegalovirus, simian virus 40, and others disclosed herein and known in the art. For other suitable expression systems for both prokaryotic and eukaryotic cells see, e.g., Chapters 16 and 17 of Sambrook, et al., Molecular Cloning: A Laboratory Manual. 2nd ed., Cold Spring Harbor Laboratory, Cold Spring Harbor Laboratory Press, Cold Spring Harbor, N.Y., 1989.

[0267] In some embodiments, the recombinant mammalian expression vector is capable of directing expression of the nucleic acid preferentially in a particular cell type (e.g., tissue-specific regulatory elements are used to express the nucleic acid). Tissue-specific regulatory elements are known in the art. Non-limiting examples of suitable tissue-specific promoters include the albumin promoter (liver-specific; Pinkert, et al., 1987. Genes Dev. 1: 268-277), lymphoid-specific promoters (Calame and Eaton, 1988. Adv. Immunol. 43: 235-275), in particular promoters of T cell receptors (Winoto and Baltimore, 1989. EMBO J. 8: 729-733) and immunoglobulins (Baneiji, et al., 1983. Cell 33: 729-740; Queen and Baltimore, 1983. Cell 33: 741-748), neuron-specific promoters (e.g., the neurofilament promoter; Byrne and Ruddle, 1989. Proc. Natl. Acad. Sci. USA 86: 5473-5477), pancreas-specific promoters (Edlund, et al., 1985. Science 230: 912-916), and mammary gland-specific promoters (e.g., milk whey promoter, U.S. Pat. No. 4,873,316 and European Application Publication No. 264,166). Developmentally-regulated promoters are also encompassed, e.g., the murine hox promoters (Kessel and Gruss, 1990. Science 249: 374-379) and the α-fetoprotein promoter (Campes and Tilghman, 1989. Genes Dev. 3: 537-546).

### Pharmaceutical Compositions

[0268] Other embodiments of the present disclosure relate to pharmaceutical compositions comprising any of the fusion proteins or the fusion protein-gRNA complexes described herein.

[0269] The term “pharmaceutical composition”, as used herein, refers to a composition formulated for pharmaceutical use. In some embodiments, the pharmaceutical composition further comprises a pharmaceutically acceptable carrier. In some embodiments, the pharmaceutical composition comprises additional agents (e.g., for specific delivery, increasing half-life, or other therapeutic compounds).

[0270] In some embodiments, any of the fusion proteins, gRNAs, and/or complexes described herein are provided as part of a pharmaceutical composition. In some embodiments, the pharmaceutical composition comprises any of the fusion proteins provided herein. In some embodiments, the pharmaceutical composition comprises any of the complexes provided herein. In some embodiments pharmaceutical composition comprises a gRNA, a napDNAbp-dCas9 fusion protein, and a pharmaceutically acceptable excipient. In some embodiments pharmaceutical composition comprises a gRNA, a napDNAbp-nCas9 fusion protein, and a pharmaceutically acceptable excipient. Pharmaceutical compositions may optionally comprise one or more additional therapeutically active substances.

[0271] In some embodiments, compositions provided herein are administered to a subject, for example, to a human subject, in order to effect a targeted genomic modification within the subject. In some embodiments, cells are obtained from the subject and contacted with any of the pharmaceutical compositions provided herein. In some embodiments, cells removed from a subject and contacted ex vivo with a pharmaceutical composition are re-introduced into the subject, optionally after the desired genomic modification has been effected or detected in the cells. Methods of delivering pharmaceutical compositions comprising nucleases are known, and are described, for example, in U.S. Pat. Nos. 6,453,242; 6,503,717; 6,534,261; 6,599,692; 6,607,882; 6,689,558; 6,824,978; 6,933,113; 6,979,539; 7,013,219; and 7,163,824, the disclosures of all of which are incorporated by reference herein in their entireties. Although the descriptions of pharmaceutical compositions provided herein are principally directed to pharmaceutical compositions which are suitable for administration to humans, it will be understood by the skilled artisan that such compositions are generally suitable for administration to animals or organisms of all sorts. Modification of pharmaceutical compositions suitable for administration to humans in order to render the compositions suitable for administration to various animals is well understood, and the ordinarily skilled veterinary pharmacologist can design and/or perform such modification with merely ordinary, if any, experimentation. Subjects to which administration of the pharmaceutical compositions is contemplated include, but are not limited to, humans and/or other primates; mammals, domesticated animals, pets, and commercially relevant mammals such as cattle, pigs, horses, sheep, cats, dogs, mice, and/or rats; and/or birds, including commercially relevant birds such as chickens, ducks, geese, and/or turkeys.

[0272] Formulations of the pharmaceutical compositions described herein may be prepared by any method known or hereafter developed in the art of pharmacology. In general, such preparatory methods include the step of bringing the active ingredient(s) into association with an excipient and/or one or more other accessory ingredients, and then, if necessary and/or desirable, shaping and/or packaging the product into a desired single- or multi-dose unit.

[0273] Pharmaceutical formulations may additionally comprise a pharmaceutically acceptable excipient, which, as used herein, includes any and all solvents, dispersion media, diluents, or other liquid vehicles, dispersion or suspension aids, surface active agents, isotonic agents, thickening or emulsifying agents, preservatives, solid binders, lubricants and the like, as suited to the particular dosage form desired. Remington's The Science and Practice of Pharmacy, 21^{st} Edition, A. R. Gennaro (Lippincott, Williams & Wilkins, Baltimore, MD, 2006; incorporated in its entirety herein by reference) discloses various excipients used in formulating pharmaceutical compositions and known techniques for the preparation thereof. See also PCT application PCT/US2010/055131 (Publication No. WO/2011053982), filed Nov. 2, 2010, which is incorporated herein by reference, for additional suitable methods, reagents, excipients and solvents for producing pharmaceutical compositions comprising a nuclease. Except insofar as any conventional excipient medium is incompatible with a substance or its derivatives, such as by producing any undesirable biological effect or otherwise interacting in a deleterious manner with any other component(s) of the pharmaceutical composition, its use is contemplated to be within the scope of this disclosure.

[0274] As used here, the term “pharmaceutically acceptable carrier” means a pharmaceutically acceptable material, composition or vehicle, such as a liquid or solid filler, diluent, excipient, manufacturing aid (e.g., lubricant, talc magnesium, calcium or zinc stearate, or steric acid), or solvent encapsulating material, involved in carrying or transporting the compound from one site (e.g., the delivery site) of the body, to another site (e.g., organ, tissue or portion of the body). A pharmaceutically acceptable carrier is “acceptable” in the sense of being compatible with the other ingredients of the formulation and not injurious to the tissue of the subject (e.g., physiologically compatible, sterile, physiologic pH, etc.). Some examples of materials which can serve as pharmaceutically acceptable carriers include: (1) sugars, such as lactose, glucose and sucrose; (2) starches, such as corn starch and potato starch; (3) cellulose, and its derivatives, such as sodium carboxymethyl cellulose, methylcellulose, ethyl cellulose, microcrystalline cellulose and cellulose acetate; (4) powdered tragacanth; (5) malt; (6) gelatin; (7) lubricating agents, such as magnesium stearate, sodium lauryl sulfate and talc; (8) excipients, such as cocoa butter and suppository waxes; (9) oils, such as peanut oil, cottonseed oil, safflower oil, sesame oil, olive oil, corn oil and soybean oil; (10) glycols, such as propylene glycol; (11) polyols, such as glycerin, sorbitol, mannitol and polyethylene glycol (PEG); (12) esters, such as ethyl oleate and ethyl laurate; (13) agar; (14) buffering agents, such as magnesium hydroxide and aluminum hydroxide; (15) alginic acid; (16) pyrogen-free water; (17) isotonic saline; (18) Ringer's solution; (19) ethyl alcohol; (20) pH buffered solutions; (21) polyesters, polycarbonates and/or polyanhydrides; (22) bulking agents, such as polypeptides and amino acids (23) serum component, such as serum albumin, HDL and LDL; (22) C2-C12 alcohols, such as ethanol; and (23) other non-toxic compatible substances employed in pharmaceutical formulations. Wetting agents, coloring agents, release agents, coating agents, sweetening agents, flavoring agents, perfuming agents, preservative and antioxidants may also be present in the formulation. The terms such as “excipient”, “carrier”, “pharmaceutically acceptable carrier” or the like are used interchangeably herein.

[0275] In some embodiments, the pharmaceutical composition is formulated for delivery to a subject, e.g., for gene editing. Suitable routes of administrating the pharmaceutical composition described herein include, without limitation: topical, subcutaneous, transdermal, intradermal, intralesional, intraarticular, intraperitoneal, intravesical, transmucosal, gingival, intradental, intracochlear, transtympanic, intraorgan, epidural, intrathecal, intramuscular, intravenous, intravascular, intraosseus, periocular, intratumoral, intracerebral, and intracerebroventricular administration.

[0276] In some embodiments, the pharmaceutical composition described herein is administered locally to a diseased site. In some embodiments, the pharmaceutical composition described herein is administered to a subject by injection, by means of a catheter, by means of a suppository, or by means of an implant, the implant being of a porous, non-porous, or gelatinous material, including a membrane, such as a sialastic membrane, or a fiber.

[0277] In some embodiments, the pharmaceutical composition is formulated in accordance with routine procedures as a composition adapted for intravenous or subcutaneous administration to a subject, e.g., a human. In some embodiments, pharmaceutical composition for administration by injection are solutions in sterile isotonic aqueous buffer. Where necessary, the pharmaceutical can also include a solubilizing agent and a local anesthetic such as lignocaine to ease pain at the site of the injection. Generally, the ingredients are supplied either separately or mixed together in unit dosage form, for example, as a dry lyophilized powder or water free concentrate in a hermetically sealed container such as an ampoule or sachette indicating the quantity of active agent. Where the pharmaceutical is to be administered by infusion, it can be dispensed with an infusion bottle containing sterile pharmaceutical grade water or saline. Where the pharmaceutical composition is administered by injection, an ampoule of sterile water for injection or saline can be provided so that the ingredients can be mixed prior to administration.

[0278] The pharmaceutical composition can be contained within a lipid particle or vesicle, such as a liposome or microcrystal, which is also suitable for parenteral administration. The particles can be of any suitable structure, such as unilamellar or plurilamellar, so long as compositions are contained therein. Compounds can be entrapped in “stabilized plasmid-lipid particles” (SPLP) containing the fusogenic lipid dioleoylphosphatidylethanolamine (DOPE), low levels (5-10 mol %) of cationic lipid, and stabilized by a polyethyleneglycol (PEG) coating (Zhang Y. P. et al., Gene Ther. 1999, 6:1438-47). Positively charged lipids such as N-[1-(2,3-dioleoyloxi)propyl]-N,N,N-trimethyl-amoniummethylsulfate, or “DOTAP,” are particularly preferred for such particles and vesicles. The preparation of such lipid particles is well known. See, e.g., U.S. Pat. Nos. 4,880,635; 4,906,477; 4,911,928; 4,917,951; 4,920,016; and 4,921,757; each of which is incorporated herein by reference.

[0279] The pharmaceutical composition described herein may be administered or packaged as a unit dose, for example. The term “unit dose” when used in reference to a pharmaceutical composition of the present disclosure refers to physically discrete units suitable as unitary dosage for the subject, each unit containing a predetermined quantity of active material calculated to produce the desired therapeutic effect in association with the required diluent; i.e., carrier, or vehicle.

[0280] Further, the pharmaceutical composition can be provided as a pharmaceutical kit comprising (a) a container containing a compound of the invention in lyophilized form and (b) a second container containing a pharmaceutically acceptable diluent (e.g., sterile water) for injection. The pharmaceutically acceptable diluent can be used for reconstitution or dilution of the lyophilized compound of the invention. Optionally associated with such container(s) can be a notice in the form prescribed by a governmental agency regulating the manufacture, use or sale of pharmaceuticals or biological products, which notice reflects approval by the agency of manufacture, use or sale for human administration.

[0281] In another aspect, an article of manufacture containing materials useful for the treatment of the diseases described above is included. In some embodiments, the article of manufacture comprises a container and a label. Suitable containers include, for example, bottles, vials, syringes, and test tubes. The containers may be formed from a variety of materials such as glass or plastic. In some embodiments, the container holds a composition that is effective for treating a disease described herein and may have a sterile access port. For example, the container may be an intravenous solution bag or a vial having a stopper pierceable by a hypodermic injection needle. The active agent in the composition is a compound of the invention. In some embodiments, the label on or associated with the container indicates that the composition is used for treating the disease of choice. The article of manufacture may further comprise a second container comprising a pharmaceutically acceptable buffer, such as phosphate-buffered saline, Ringer's solution, or dextrose solution. It may further include other materials desirable from a commercial and user standpoint, including other buffers, diluents, filters, needles, syringes, and package inserts with instructions for use.

### Kits and Cells

[0282] This disclosure provides kits comprising any one of the compositions, complexes, gRNAs, polynucleotides, vectors, and/or cells disclosed herein. Some embodiments of this disclosure provide kits comprising a nucleic acid construct comprising a nucleotide sequence encoding an enzyme domain-napDNAbp fusion protein capable inserting a single transition and/or transversion mutation into a DNA sequence encoding an endogenous tRNA. In some embodiments, the nucleotide sequence encodes any of the enzyme domains provided herein. In some embodiments, the nucleotide sequence comprises a heterologous promoter that drives expression of the fusion protein. The nucleotide sequence may further comprise a heterologous promoter that drives expression of the gRNA, or a heterologous promoter that drives expression of the fusion protein and the gRNA.

[0283] In some embodiments, the kit further comprises an expression construct encoding a guide nucleic acid backbone, e.g., a guide RNA backbone, wherein the construct comprises a cloning site positioned to allow the cloning of a nucleic acid sequence identical or complementary to a target sequence into the guide nucleic acid, e.g., guide RNA backbone. In some embodiments, the kit further comprises an expression construct comprising a nucleotide sequence encoding an iBER.

[0284] The disclosure further provides kits comprising a fusion protein as provided herein, a gRNA having complementarity to a target sequence, and one or more of the following: cofactor proteins, buffers, media, and target cells (e.g. human cells). Kits may comprise combinations of several or all of the aforementioned components.

[0285] Some embodiments of this disclosure provide cells comprising any of the polynucleotides, complexes, gRNAs, and/or vectors disclosed herein. In some embodiments, the cells comprise a nucleotide that encodes any of the fusion proteins provided herein. In some embodiments, the cells comprise any of the nucleotides or vectors provided herein.

[0286] In some embodiments, a host cell is transiently or non-transiently transfected with one or more vectors described herein. In some embodiments, a cell is transfected as it naturally occurs in a subject. In some embodiments, a cell that is transfected is taken from a subject. In some embodiments, the cell is derived from cells taken from a subject, such as a cell line. A wide variety of cell lines for tissue culture are known in the art. Examples of cell lines include, but are not limited to, C8161, CCRF-CEM, MOLT, mIMCD-3, NHDF, HeLa-S3, Huh1, Huh4, Huh7, HUVEC, HASMC, HEKn, HEKa, MiaPaCell, Panc1, PC-3, TF1, CTLL-2, ClR, Rat6, CV1, RPTE, A10, T24, J82, A375, ARH-77, Calul, SW480, SW620, SKOV3, SK-UT, CaCo2, P388D1, SEM-K2, WEHI-231, HB56, TIB55, Jurkat, J45.01, LRMB, Bcl-1, BC-3, IC21, DLD2, Raw264.7, NRK, NRK-52E, MRC5, MEF, Hep G2, HeLa B, HeLa T4, COS, COS-1, COS-6, COS-M6A, BS-C-1 monkey kidney epithelial, BALB/3T3 mouse embryo fibroblast, 3T3 Swiss, 3T3-L1, 132-d5 human fetal fibroblasts; 10.1 mouse fibroblasts, 293-T, 3T3, 721, 9L, A2780, A2780ADR, A2780cis, A 172, A20, A253, A431, A-549, ALC, B16, B35, BCP-1 cells, BEAS-2B, bEnd.3, BHK-21, BR 293. BxPC3. C3H-10T1/2, C6/36, Cal-27, CHO, CHO-7, CHO-IR, CHO-K1, CHO-K2, CHO-T, CHO Dhfr −/−, COR-L23, COR-L23/CPR, COR-L23/5010, COR-L23/R23, COS-7, COV-434, CML T1, CMT, CT26, D17, DH82, DU145, DuCaP, EL4, EM2, EM3, EMT6/AR1, EMT6/AR10.0, FM3, H1299, H69, HB54, HB55, HCA2, HEK-293, HeLa, Hepalclc7, HL-60, HMEC, HT-29, Jurkat, JY cells, K562 cells, Ku812, KCL22, KG1, KYO1, LNCap, Ma-Mel 1-48, MC-38, MCF-7, MCF-10A, MDA-MB-231, MDA-MB-468, MDA-MB-435, MDCK II, MDCK 11, MOR/0.2R, MONO-MAC 6, MTD-1A, MyEnd, NCI-H69/CPR, NCI-H69/LX10, NCI-H69/LX20, NCI-H69/LX4, NIH-3T3, NALM-1, NW-145, OPCN/OPCT cell lines, Peer, PNT-1A/PNT 2, RenCa, RIN-5F, RMA/RMAS, Saos-2 cells, Sf-9, SkBr3, T2, T-47D, T84, THP1 cell line, U373, U87, U937, VCaP, Vero cells, WM39, WT-49, X63, YAC-1, YAR, and transgenic varieties thereof. Cell lines are available from a variety of sources known to those with skill in the art (see, e.g., the American Type Culture Collection (ATCC) (Manassas, Va.)). In some embodiments, a cell transfected with one or more vectors described herein is used to establish a new cell line comprising one or more vector-derived sequences. In some embodiments, a cell transiently transfected with the components of a CRISPR system as described herein (such as by transient transfection of one or more vectors, or transfection with RNA), and modified through the activity of a CRISPR complex, is used to establish a new cell line comprising cells containing the modification but lacking any other exogenous sequence. In some embodiments, cells transiently or non-transiently transfected with one or more vectors described herein, or cell lines derived from such cells are used in assessing one or more test compounds.

eVLPs

[0287] Aspects of the present disclosure further relate to eVLPs, for example, to deliver the base editors to a subject in need thereof. In various embodiments, the eVLPs (e.g., BE-VLPs) consist of a supra-molecular assembly comprising (a) an envelope comprising (i) a lipid membrane (e.g., single-layer or bi-layer membrane) and a (ii) viral envelope glycoprotein and (b) a multi-protein core region enclosed by the envelope and comprising (i) a Gag protein, (ii) a Gag-Pro-Pol protein (with the “Pro” component bi (, and (iii) a Gag-cargo fusion protein comprising a Gag protein fused to a cargo protein (e.g., a napDNAbp or BE) via a cleavable linker (e.g., a protease-cleavable linker). In various embodiments, the cargo protein is a napDNAbp (e.g., Cas9). In other embodiments, the cargo protein is a base editor. In various other embodiments, the multi-protein core region of the VLPs further comprises one or more guide RNA molecules which are complexed with the napDNAbp or the base editor to form a ribonucleoprotein (RNP). In various embodiments, the VLPs are prepared in a producer cell that is transiently transformed with plasmid DNA that encodes the various protein and nucleic acid (sgRNA) components of the VLPs. Without being bound by theory, the components self-assemble at the cell membrane and bud out in accordance with the naturally occurring mechanism of budding (e.g., retroviral budding or the budding mechanism of other envelope viruses) in order to release from the cell fully-matured VLPs. Once formed, the Gag-Pol-Pro cleaves the protease-sensitive linker of the Gag-cargo (i.e., [Gag]-[cleavable linker]-[cargo], wherein the cargo can be BE-RNP or a napDNAbp RNP) thereby releasing the BE RNP and/or napDNAbp RNA, as the case may be, within the VLP. Once the VLP is administered to a recipient cell and taken up by said recipient cell, the contents of the VLP are released, e.g., released BE RNP and/or napDNAbp RNP. Once in the cell, the RNPs may translocate to the nuclease of the cell (in particular, where NLSs are included on the RNPs), where DNA editing may occur at target sites specified by the guide RNA. Various embodiments comprise one or more improvements.

[0288] In one improvement, the protease-cleavable linker is optimized to improve cleavage efficiency after VLP maturation, as demonstrated herein for v.2 VLPs (or “second generation” VLPs).

[0289] In another improvement, the Gag-cargo fusion (e.g., Gag-BE) further comprises one or more nuclear export signals at one or more locations along the length of the fusion polypeptide protein which may be joined by a cleavable linker such that during VLP assembly in the producer cell, the Gag-cargo fusions (due to presence of competing NLS signals) do not accumulate in the nucleus of the producer cells but instead are available in the cytoplasm to undergo the VLP assembly process at the cell membrane. Once inside the matured VLPs following release from the producer cell, the NES may be cleaved by Gag-Pro-Pol thereby separating the cargo (e.g., napDNAbp or a BE) from the NES. Upon delivery to a recipient cell, therefore, the cargo (e.g., napDNAbp or BE, typically flanked with one or more NLS elements) will not comprise an NES element, which may otherwise prohibit the transport of the cargo into the nuclease and hinder gene editing activity. This is exemplified as v.3 VLPs described herein (or “third generation” VLPs).

[0290] In another improvement, as demonstrated by v.4 VLPs (or “fourth generation” VLPs) described herein, the inventors found an optimized stoichiometry ratio of Gag-cargo fusion to Gag-Pro-Pol fusion protein which balances the amount of Gag-cargo available to be packaged into VLPs with the amount of retrovirus protease (the “Pro” in the Gag-Pro-Pol fusion) required for VLP maturation. In one embodiment, the optimized ratio of Gag-cargo fusion to Gag-Pro-Pol fusion protein is achieved by the appropriate ratio of plasmids encoding each component which are transiently delivered to the producer cells. In one embodiment, to modulate the stoichiometry of the Gag-cargo fusion to Gag-Pro-Pol fusion, the ratio of the plasmid encoding Gag-cargo (e.g., Gag-3xNES-ABE8e) to wild-type MMLV gag-pro-pol plasmids transfected for VLP production was varied. It was found that increasing the amount of gag-cargo plasmid beyond the original proportion used for producing v3.4 BE-eVLPs (38% Gag-cargo plasmid and 62% gag-pro-pol plasmid) did not improve editing efficiencies. Decreasing the proportion of gag-cargo plasmid from 38% to 25% modestly improved editing efficiencies. However, further decreasing the proportion of gag-cargo plasmid below 25% reduced editing efficiencies. These results are consistent with a model in which an optimal gag-cargo:gag-pro-pol stoichiometry balances the amount of gag-cargo available to be packaged into VLPs with the amount of MMLV protease (the “pro” in gag-pro-pol) required for VLP maturation. In one embodiment, the results of this final round of optimization revealed a fourth-generation (v4) BE-eVLP formulation, which combines the optimal gag-BE:gag-pro-pol stoichiometry (25% gag-BE) with the v3.4 BE-eVLP architecture.

[0291] Accordingly, in one aspect, the present disclosure provides a eVLP comprising an (a) envelope and (b) a multi-protein core, wherein the envelope comprises a lipid membrane (e.g., a lipid mono or bi-layer membrane) and a viral envelope glycoprotein and wherein the multi-protein core comprises a Gag (e.g., a retroviral Gag), a group-specific antigen (gag) protease (pro) polyprotein (i.e., “Gag-Pro-Pol”) and a fusion protein comprising a Gag-cargo (e.g., Gag-napDNAbp or Gag-BE). In various embodiments, the Gag-cargo may comprise a ribonucleoprotein cargo, e.g., a napDNAbp or a BE complexed with a guide RNA. In still further embodiments, the Gag-cargo (e.g., Gag fused to a napDNAbp or a BE) may comprise one or more NLS sequences and/or one or more NES sequences to regulate the cellular location of the cargo in a cell. An NLS sequence will facilitate the transport of the cargo into the cell's nuclease to facilitate editing. A NES will do the opposite, i.e., transport the cargo out from the nucleus, and/or prevent the transport of the cargo into the nucleus. In certain embodiments, the NES may be coupled to the fusion protein by a cleavable linker (e.g., a protease linker) such that during assembly in a producer cell, the NES signals operates to keep the cargo in the cytoplasm and available for the packaging process. However, once matured VLPs are budded out or released from a producer cell in a mature form, the cleavable linker joining the NES may be cleaved, thereby removing the association of NES with the cargo. Thus, without an NES, the cargo will translocate to the nuclease with its NLS sequences, thereby facilitating editing. Various napDNAbps may be used in the systems of the present disclosure. In some embodiments, the napDNAbp is a Cas9 protein (e.g., a Cas9 nickase, dead Cas9 (dCas9), or another Cas9 variant as described herein). In some embodiments, the Cas9 protein is bound to a guide RNA (gRNA). The fusion protein may further comprise other protein domains, such as effector domains. In some embodiments, the fusion protein further comprises a deaminase domain (e.g., an adenosine deaminase domain or a cytosine deaminase domain). In certain embodiments, the fusion protein comprises a base editor, such as ABE8e, or any of the other base editors described herein or known in the art.

[0292] In some embodiments, the fusion protein comprises more than one NES (e.g., two NES, three NES, four NES, five NES, six NES, seven NES, eight NES, nine NES, or ten or more NES). In certain embodiments, the fusion protein further comprises a nuclear localization sequence (NLS), or more than one NLS (e.g., two NLS, three NLS, four NLS, five NLS, six NLS, seven NLS, eight NLS, nine NLS, or ten or more NLS). In certain embodiments, the fusion protein may comprising at least one NES and one NLS.

[0293] The Gag-cargo fusion proteins described herein comprise one or more cleavable linkers. In one embodiment, the Gag-cargo fusion proteins comprise a cleavable linker joining the Gag to the cargo, such that once the Gag-cargo fusion has been packaged in mature VLPs (which will also contain the Gag-Pro-Pol, the protease activity can cleave the Gag-cargo cleavable linker, thereby releasing the cargo. In some embodiments, a cleavable linker may also be provided in such a location such that when the cleavable linker is cleaved (e.g., by the Gag-Pro-Pol protein), the NES is separated away from the cargo protein. Such an arrangement of the fusion protein allows the fusion protein to be exported from the nucleus of a producing cell during BE-VLP production, and the NES can later be cleaved from the fusion protein after delivery to a target cell, releasing the BE and allowing it to enter the nucleus of the target cell. In some embodiments, the cleavable linker comprises a protease cleavage site (e.g., a Moloney murine leukemia virus (MMLV) protease cleavage site or a Friend murine leukemia virus (FMLV) protease cleavage site). Various protease cleavage sites can be used in the fusion proteins of the present disclosure. In certain embodiments, the protease cleavage site comprises the amino acid sequence TSTLLMENSS (SEQ ID NO: 163), PRSSLYPALTP (SEQ ID NO: 164), VQALVLTQ (SEQ ID NO: 165), PLQVLTLNIERR (SEQ ID NO: 166), or an amino acid sequence at least 90% identical to any one of SEQ ID NOs: 163-166. In some embodiments, the cleavable linker of the fusion protein is cleaved by the protease of the gag-pro polyprotein. In certain embodiments, the cleavable linker of the fusion protein is not cleaved by the protease of the gag-pro polyprotein until the BE-VLP has been assembled and delivered into a target cell. In some embodiments, the gag-pro polyprotein of the BE-VLPs described herein comprises an MMLV gag-pro polyprotein or an FMLV gag-pro polyprotein. In some embodiments, the gag nucleocapsid protein of the fusion protein in the BE-VLPs described herein comprises an MMLV gag nucleocapsid protein or an FMLV gag nucleocapsid protein.

In certain embodiments, the fusion protein comprises the following non-limiting structures:
[0294] [gag nucleocapsid protein]-[1X-3X NES]-[cleavable linker]-[NLS]-[deaminase domain]-[napDNAbp]-[NLS], wherein]-[comprises an optional linker (e.g., an amino acid linker, or any of the linkers provided herein);
[0295] [1X-3X NES]-[gag nucleocapsid protein]-[cleavable linker]-[NLS]-[deaminase domain]-[napDNAbp]-[NLS], wherein]-[comprises an optional linker (e.g., an amino acid linker, or any of the linkers provided herein); or
[0296] [gag nucleocapsid protein]-[1X-3X NES]-[cleavable linker]-[NLS]-[deaminase domain]-[napDNAbp]-[NLS]-[cleavable linker]-[1X-3X NES], wherein]-[comprises an optional linker (e.g., an amino acid linker, or any of the linkers provided herein).

[0297] The eVLPs (e.g., the BE-VLPs) provided by the present disclosure comprise an outer encapsulation layer (or envelope layer) comprising a viral envelope glycoprotein. Any viral envelope glycoprotein described herein, or known in the art, may be used in the BE-VLPs of the present disclosure. In some embodiments, the viral envelope glycoprotein is an adenoviral envelope glycoprotein, an adeno-associated viral envelope glycoprotein, a retroviral envelope glycoprotein, or a lentiviral envelope glycoprotein. In certain embodiments, the viral envelope glycoprotein is a retroviral envelope glycoprotein. In some embodiments, the viral envelope glycoprotein is a vesicular stomatitis virus G protein (VSV-G), a baboon retroviral envelope glycoprotein (BaEVRless), a FuG-B2 envelope glycoprotein, an HIV-1 envelope glycoprotein, or an ecotropic murine leukemia virus (MLV) envelope glycoprotein. In some embodiments, the viral envelope glycoprotein targets the system to a particular cell type (e.g., immune cells, neural cells, retinal pigment epithelium cells, etc.). For example, using different envelope glycoproteins in the eVLPs described herein may alter their cellular tropism, allowing the BE-VLPs to be targeted to specific cell types. In some embodiments, the viral envelope glycoprotein is a VSV-G protein, and the VSV-G protein targets the system to retinal pigment epithelium (RPE) cells. In some embodiments, the viral envelope glycoprotein is an HIV-1 envelope glycoprotein, and the HIV-1 envelope glycoprotein targets the system to CD4+ cells. In some embodiments, the viral envelope glycoprotein is a FuG-B2 envelope glycoprotein, and the FuG-B2 envelope glycoprotein targets the system to neurons.

[0298] It will be appreciated that general methods are known in the art for producing viral vector particles, which generally contain coding nucleic acids of interest, may also be used for producing the virus-derived particles according to the present invention, which do not contain coding nucleic acids of interest but instead are designed to deliver a protein cargo (e.g., a BE RNP).

[0299] Conventional viral vector particles encompass retroviral, lentiviral, adenoviral and adeno-associated viral vector particles that are well known in the art. For a review of various viral vector particles that may be used, the one skilled in the art may notably refer to Kushnir et al. (2012, Vaccine, Vol. 31: 58-83), Zeltons (2013, Mol Biotechnol, Vol. 53: 92-107), Ludwig et al. (2007, Curr Opin Biotechnol, Vol. 18(no 6): 537-55) and Naskalaska et al. (2015, Polish Journal of Microbology, Vol. 64 (no 1): 3-13). Further, references to various methods using virus-derived particles for delivering proteins to cells are found by the one skilled in the art in the article of Maetzig et al. (2012, Current Gene Therapy, Vol. 12: 389-409) as well as the article of Kaczmarczyk et al. (2011, Proc Natl Acad Sci USA, Vol. 108 (no 41): 16998-17003).

[0300] Generally, a virus-like particle that is used according to the present disclosure, which virus-like particle may also be termed “virus-derived particle,” is formed by one or more virus-derived structural protein(s) and/or one more virus-derived envelope protein.

[0301] A virus-like particle that is used according to the present invention is replication incompetent in a host cell wherein it has entered.

[0302] In preferred embodiments, a virus-like particle is formed by one or more retrovirus-derived structural protein(s) and optionally one or more virus-derived envelope protein(s).

[0303] In preferred embodiments, the virus-derived structural protein is a retroviral Gag protein or a peptide fragment thereof. As it is known in the art, Gag and Gag/pol precursors are expressed from full length genomic RNA as polyproteins, which require proteolytic cleavage, mediated by the retroviral protease (PR), to acquire a functional conformation. Further, Gag, which is structurally conserved among the retroviruses, is composed of at least three protein units: matrix protein (MA), capsid protein (CA) and nucleocapsid protein (NC), whereas Pol consists of the retroviral protease, (PR), the retrotranscriptase (RT) and the integrase (IN).

[0304] In some embodiments, a virus-derived particle comprises a retroviral Gag protein but does not comprise a Pol protein.

[0305] As it is known in the art, the host range of retroviral vector, including lentiviral vectors, may be expanded or altered by a process known as pseudotyping. Pseudotyped lentiviral vectors consist of viral vector particles bearing glycoproteins derived from other enveloped viruses. Such pseudotyped viral vector particles possess the tropism of the virus from which the glycoprotein is derived.

[0306] In some embodiments, a virus-like particle is a pseudotyped virus-like particle comprising one or more viral structural protein(s) or viral envelope protein(s) imparting a tropism to the said virus-like particle for certain eukaryotic cells. A pseudotyped virus-like particle as described herein may comprise, as the viral protein used for pseudotyping, a viral envelope protein selected in a group comprising VSV-G protein, Measles virus HA protein, Measles virus F protein, Influenza virus HA protein, Moloney virus MLV-A protein, Moloney virus MLV-E protein, Baboon Endogenous retrovirus (BAEV) envelope protein, Ebola virus glycoprotein and foamy virus envelope protein, or a combination of two or more of these viral envelope proteins.

[0307] A well-known illustration of pseudotyping viral vector particles consists of the pseudotyping of viral vector particles with the vesicular stomatitis virus glycoprotein (VSV-G). For the pseudotyping of viral vector particles, the one skilled in the art may notably refer to Yee et al. (1994, Proc Natl Acad Sci, USA, Vol. 91: 9564-9568) Cronin et al. (2005, Curr Gene Ther, Vol. 5(no 4): 387-398), which are incorporated herein by reference.

[0308] For producing virus-like particles, and more precisely VSV-G pseudotypes virus-like particles, for delivering protein(s) of interest into target cells, the one skilled in the art may refer to Mangeot et al. (2011, Molecular Therapy, Vol. 19 (no 9): 1656-1666).

[0309] In some embodiments, a virus-like particle further comprises a viral envelope protein, wherein either (i) the said viral envelope protein originates from the same virus as the viral structural protein, e.g., originates from the same virus as the viral Gag protein, or (ii) the said viral envelope protein originates from a virus distinct from the virus from which originates the viral structural protein, e.g. originates from a virus distinct from the virus from which originates the viral Gag protein.

[0310] As it is readily understood by the one skilled in the art, a virus-like particle that is used according to the disclosure may be selected in a group comprising Moloney murine leukemia virus-derived vector particles, Bovine immunodeficiency virus-derived particles, Simian immunodeficiency virus-derived vector particles, Feline immunodeficiency virus-derived vector particles, Human immunodeficiency virus-derived vector particles, Equine infection anemia virus-derived vector particles, Caprine arthritis encephalitis virus-derived vector particle, Baboon endogenous virus-derived vector particles, Rabies virus-derived vector particles, Influenza virus-derived vector particles, Norovirus-derived vector particles, Respiratory syncytial virus-derived vector particles, Hepatitis A virus-derived vector particles, Hepatitis B virus-derived vector particles, Hepatitis E virus-derived vector particles, Newcastle disease virus-derived vector particles, Norwalk virus-derived vector particles, Parvovirus-derived vector particles, Papillomavirus-derived vector particles, Yeast retrotransposon-derived vector particles, Measles virus-derived vector particles, and bacteriophage-derived vector particles.

[0311] In particular, a virus-like particle that is used according to the invention is a retrovirus-derived particle. Such retrovirus may be selected among Moloney murine leukemia virus, Bovine immunodeficiency virus, Simian immunodeficiency virus, Feline immunodeficiency virus, Human immunodeficiency virus, Equine infection anemia virus, and Caprine arthritis encephalitis virus.

[0312] In another embodiment, a virus-like particle that is used according to the disclosure is a lentivirus-derived particle. Lentiviruses belong to the retroviruses family and have the unique ability of being able to infect non-dividing cells.

[0313] Such lentivirus may be selected among Bovine immunodeficiency virus, Simian immunodeficiency virus, Feline immunodeficiency virus, Human immunodeficiency virus, Equine infection anemia virus, and Caprine arthritis encephalitis virus.

[0314] For preparing Moloney murine leukemia virus-derived vector particles, one skilled in the art may refer to the methods disclosed by Sharma et al. (1997, Proc Natl Acad Sci USA, Vol. 94: 10803+-10808), Guibingua et al. (2002, Molecular Therapy, Vol. 5(no 5): 538-546), which are incorporated herein by reference. Moloney murine leukemia virus-derived (MLV-derived) vector particles may be selected in a group comprising MLV-A-derived vector particles and MLV-E-derived vector particles.

[0315] For preparing Bovine Immunodeficiency virus-derived vector particles, the one skilled in the art may refer to the methods disclosed by Rasmussen et al. (1990, Virology, Vol. 178(no 2): 435-451), which is incorporated herein by reference.

[0316] For preparing Simian immunodeficiency virus-derived vector particles, including VSV-G pseudotyped SIV virus-derived particles, the one skilled in the art may notably refer to the methods disclosed by Mangeot et al. (2000, Journal of Virology, Vol. 71(no 18): 8307-8315), Negre et al. (2000, Gene Therapy, Vol. 7: 1613-1623) Mangeot et al. (2004, Nucleic Acids Research, Vol. 32 (no 12), e102), which are incorporated herein by reference.

[0317] For preparing Feline Immunodeficiency virus-derived vector particles, the one skilled in the art may notably refer to the methods disclosed by Saenz et al. (2012, Cold Spring Harb Protoc, (1): 71-76; 2012, Cold Spring Harb Protoc, (1): 124-125; 2012, Cold Spring Harb Protoc, (1): 118-123), which are incorporated herein by reference.

[0318] For preparing Human immunodeficiency virus-derived vector particles, the one skilled in the art may notably refer to the methods disclosed by Jalaguier et al. (2011, PlosOne, Vol. 6(no 11), e28314), Cervera et al. (J Biotechnol, Vol. 166(no 4): 152-165), Tang et al. (2012, Journal of Virology, Vol. 86(no 14): 7662-7676), which are incorporated herein by reference.

[0319] For preparing Equine infection anemia virus-derived vector particles, the one skilled in the art may notably refer to the methods disclosed by Olsen (1998, Gene Ther, Vol. 5(no 11): 1481-1487), which are incorporated herein by reference.

[0320] For preparing Caprine arthritis encephalitis virus-derived vector particles, the one skilled in the art may notably refer to the methods disclosed by Mselli-Lakhal et al. (2006, J Virol Methods, Vol. 136(no 1-2): 177-184), which are incorporated herein by reference.

[0321] For preparing Baboon endogenous virus-derived vector particles, the one skilled in the art may notably refer to the methods disclosed by Girard-Gagnepain et al. (2014, Blood, Vol. 124(no 8): 1221-1231), which is incorporated herein by reference.

[0322] For preparing Rabies virus-derived vector particles, the one skilled in the art may notably refer to the methods disclosed by Kang et al. (2015, Viruses, Vol. 7: 1134-1152, doi:10.3390/v7031134), Fontana et al. (2014, Vaccine, Vol. 32(no 24): 2799-27804) or to the PCT application published under no WO 2012/0618, which is incorporated herein by reference.

[0323] For preparing Influenza virus-derived vector particles, the one skilled in the art may notably refer to the methods disclosed by Quan et al. (2012, Virology, Vol. 430: 127-135) and to Latham et al. (2001, Journal of Virology, Vol. 75(no 13): 6154-6155), which is incorporated herein by reference.

[0324] For preparing Norovirus-derived vector particles, the one skilled in the art may notably refer to the methods disclosed by Tomd-Amat et al., (2014, Microbial Cell Factories, Vol. 13: 134-142), which is incorporated herein by reference.

[0325] For preparing Respiratory syncytial virus-derived vector particles, the one skilled in the art may notably refer to the methods disclosed by Walpita et al. (2015, PlosOne, DOI: 10.1371/journal.pone.0130755), which is incorporated herein by reference.

[0326] For preparing Hepatitis B virus-derived vector particles, the one skilled in the art may notably refer to the methods disclosed by Hong et al. (2013, Viruses, Vol. 87(no 12): 6615-6624), which is incorporated herein by reference.

[0327] For preparing Hepatitis E virus-derived vector particles, the one skilled in the art may notably refer to the methods disclosed by Li et al. (1997, Journal of Virology, Vol. 71(no 10): 7207-7213), which is incorporated herein by reference.

[0328] For preparing Newcastle disease virus-derived vector particles, the one skilled in the art may notably refer to the methods disclosed by Murawski et al. (2010, Journal of Virology, Vol. 84(no 2): 1110-1123), which is incorporated herein by reference.

[0329] For preparing Norwalk virus-derived vector particles, the one skilled in the art may notably refer to the methods disclosed by Herbst-Kralovetz et al. (2010, Expert Rev Vaccines, Vol. 9(no 3): 299-307), which is incorporated herein by reference.

[0330] For preparing Parvovirus-derived vector particles, the one skilled in the art may notably refer to the methods disclosed by Ogasawara et al. (2006, In Vivo, Vol. 20: 319-324), which is incorporated herein by reference.

[0331] For preparing Papillomavirus-derived vector particles, the one skilled in the art may notably refer to the methods disclosed by Wang et al. (2013, Expert Rev Vaccines, Vol. 12(no 2): doi:10.1586/erv.12.151), which is incorporated herein by reference.

[0332] A virus-like particle that is used herein comprises a Gag protein, and most preferably a Gag protein originating from a virus selected in a group comprising Rous Sarcoma Virus (RSV) Feline Immunodeficiency Virus (FIV), Simian Immunodeficiency Virus (SIV), Moloney Leukemia Virus (MLV) and Human Immunodeficiency Viruses (HIV-1 and HIV-2) especially Human Immunodeficiency Virus of type 1 (HIV-1).

[0333] In some embodiments, a virus-like particle may also comprise one or more viral envelope protein(s). The presence of one or more viral envelope protein(s) may impart to the said virus-derived particle a more specific tropism for the cells which are targeted, as it is known in the art. The one or more viral envelope protein(s) may be selected in a group comprising envelope proteins from retroviruses, envelope proteins from non-retroviral viruses, and chimeras of these viral envelope proteins with other peptides or proteins. An example of a non-lentiviral envelope glycoprotein of interest is the lymphocytic choriomeningitis virus (LCMV) strain WE54 envelope glycoprotein. These envelope glycoproteins increase the range of cells that can be transduced with retroviral derived vectors.

### EXAMPLES

### Example 1. Base Editing Conversion of Endogenous tRNAs to Suppressor tRNAs in HEK293T cells

[0334] To demonstrate the validity of BERT, a base editing guide RNAs were designed targeting two endogenous tRNAs, Gln-TTG-4-1 and Gln-CTG-6-1, to effectuate mutations in their anticodons to TTA and CTA, respectively. These gRNAs were delivered alongside an optimized base editor enzyme²⁹ to HEK293T cells. Subsequent sequencing showed that approximately 20% of the reads exhibited the desired edit with less than 1% indels (See FIG. 1).

### Example 2. Demonstration of BERT Using an eGFP Reporter Assay

[0335] A base editing guide RNA compatible with NG-Cas9 was designed to target the endogenous Gln-CTG-6-1 tRNA, converting the anticodon to CTA. This guide RNA was co-delivered with the NG-Cas9 TadCBEd to HEK293T cells. Forty-eight hours after the editing components were delivered, a reporter plasmid encoding an eGFP cassette with a PTC was transfected into the edited cells and unedited control cells (see FIG. 2). The frequency of cells exhibiting readthrough was quantified using fluorescence-activated cell sorting (FACS, FIG. 2B) and editing efficiency was quantified using amplicon sequencing (FIG. 2A). In Gln-CTG-6-1 edited cells fluorescent signal was 7.7% of wild type eGFP control cell populations, respectively (FIG. 2B). Together, these data support BERT as a viable strategy to elicit PTC readthrough.

### REFERENCES

[0336] Mort, M., Ivanov, D., Cooper, D. N. & Chuzhanova, N. A. A meta-analysis of nonsense mutations causing human genetic disease. Hum Mutat 29, 1037-1047 (2008).
[0337] Karijolich, J. & Yu, Y. T. Therapeutic suppression of premature termination codons: mechanisms and clinical considerations (review). Int J Mol Med 34, 355-362 (2014).
[0338] Banskota, S. et al. Engineered virus-like particles for efficient in vivo delivery of therapeutic proteins. Cell 185, 250-265 e216 (2022).
[0339] Krishnamurthy, S. et al. Functional correction of CFTR mutations in human airway epithelial cells using adenine base editors. Nucleic Acids Res 49, 10558-10572 (2021).
[0340] Osborn, M. J. et al. Base Editor Correction of COL7A1 in Recessive Dystrophic Epidermolysis Bullosa Patient-Derived Fibroblasts and iPSCs. J Invest Dermatol 140, 338-347 e335 (2020).
[0341] Porter, J. J., Heil, C. S. & Lueck, J. D. Therapeutic promise of engineered nonsense suppressor tRNAs. Wiley Interdiscip Rev RNA 12, e1641 (2021).
[0342] Liu, C. C. & Schultz, P. G. Adding new chemistries to the genetic code. Annu Rev Biochem 79, 413-444 (2010).
[0343] Wang, J. et al. AAV-delivered suppressor tRNA overcomes a nonsense mutation in mice. Nature 604, 343-348 (2022).
[0344] Lueck, J. D. et al. Engineered transfer RNAs for suppression of premature termination codons. Nat Commun 10, 822 (2019).
[0345] Buvoli, M., Buvoli, A. & Leinwand, L. A. Suppression of nonsense mutations in cell culture and mice by multimerized suppressor tRNA genes. Mol Cell Biol 20, 3116-3124 (2000).
[0346] Torres, A. G., Reina, O., Stephan-Otto Attolini, C. & Ribas de Pouplana, L. Differential expression of human tRNA genes drives the abundance of tRNA-derived fragments. Proc Natl Acad Sci USA 116, 8451-8456 (2019).
[0347] Iben, J. R. & Maraia, R. J. tRNA gene copy number variation in humans. Gene 536, 376-384 (2014).
[0348] Berg, M. D. & Brandl, C. J. Transfer RNAs: diversity in form and function. RNA Biol 18, 316-339 (2021).
[0349] Himeno, H., Yoshida, S., Soma, A. & Nishikawa, K. Only one nucleotide insertion to the long variable arm confers an efficient serine acceptor activity upon Saccharomyces cerevisiae tRNA(Leu) in vitro. J Mol Biol 268, 704-711 (1997).
[0350] Anzalone, A. V. et al. Search-and-replace genome editing without double-strand breaks or donor DNA. Nature 576, 149-157 (2019).
[0351] Anzalone, A. V. et al. Programmable deletion, replacement, integration and inversion of large DNA sequences with twin prime editing. Nat Biotechnol 40, 731-740 (2022).
[0352] Chan, P. P. & Lowe, T. M. GtRNAdb 2.0: an expanded database of transfer RNA genes identified in complete and draft genomes. Nucleic Acids Res 44, D184-189 (2016).
[0353] Nelson, J. W. et al. Engineered pegRNAs improve prime editing efficiency. Nat Biotechnol (2021).
[0354] Doman, J. L., Sousa, A. A., Randolph, P. B., Chen, P. J. & Liu, D. R. Designing and executing prime editing experiments in mammalian cells. Nat Protoc 17, 2431-2468 (2022).
[0355] Duvoisin, R. et al. Human U6 promoter drives stronger shRNA activity than its schistosome orthologue in Schistosoma mansoni and human fibrosarcoma cells. Transgenic Res 21, 511-521 (2012).
[0356] Yarnall, M. T. N. et al. Drag-and-drop genome insertion of large sequences without double-strand DNA cleavage using CRISPR-directed integrases. Nat Biotechnol (2022).
[0357] Durrant, M. G. et al. Systematic discovery of recombinases for efficient integration of large DNA sequences into the human genome. Nat Biotechnol (2022).
[0358] Klompe, S. E., Vo, P. L. H., Halpin-Healy, T. S. & Sternberg, S. H. Transposon-encoded CRISPR-Cas systems direct RNA-guided DNA integration. Nature 571, 219-225 (2019).
[0359] Strecker, J. et al. RNA-guided DNA insertion with CRISPR-associated transposases. Science 365, 48-53 (2019).
[0360] Tou, C. J. & Kleinstiver, B. P. Recent Advances in Double-Strand Break-Free Kilobase-Scale Genome Editing Technologies. Biochemistry (2022).
[0361] Chen, P. J. & Liu, D. R. Prime editing for precise and highly versatile genome manipulation. Nat Rev Genet (2022).
[0362] Clarke, L. A. et al. The effect of premature termination codon mutations on CFTR mRNA abundance in human nasal epithelium and intestinal organoids: a basis for read-through therapies in cystic fibrosis. Hum Mutat 40, 326-334 (2019).
[0363] Buckley, R. H. The multiple causes of human SCID. J Clin Invest 114, 1409-1411 (2004).
[0364] Chen, P. J. et al. Enhanced prime editing systems by manipulating cellular determinants of editing outcomes. Cell 184, 5635-5652.e5629 (2021).
[0365] Anzalone, A. V., Koblan, L. W. & Liu, D. R. Genome editing with CRISPR-Cas nucleases, base editors, transposases and prime editors. Nat Biotechnol 38, 824-844 (2020).
[0366] Gaudelli, N. M. et al. Programmable base editing of A*T to G*C in genomic DNA without DNA cleavage. Nature 551, 464-471 (2017).
[0367] Komor, A. C., Kim, Y. B., Packer, M. S., Zuris, J. A. & Liu, D. R. Programmable editing of a target base in genomic DNA without double-stranded DNA cleavage. Nature 533, 420-424 (2016).
[0368] Newby, G. A. & Liu, D. R. In vivo somatic cell base editing and prime editing. Mol Ther 29, 3107-3124 (2021).
[0369] Rees, H. A. & Liu, D. R. Base editing: precision chemistry on the genome and transcriptome of living cells. Nat Rev Genet 19, 770-788 (2018).
[0370] Koblan, L. W. et al. Efficient C*G-to-G*C base editors developed using CRISPRi screens, target-library analysis, and machine learning. Nat Biotechnol 39, 1414-1425 (2021).
[0371] Nishimasu, H. et al. Engineered CRISPR-Cas9 nuclease with expanded targeting space. Science 361, 1259-1262 (2018).
[0372] Neugebauer, M. E. et al. Evolution of an adenine base editor into a small, efficient cytosine base editor with low off-target activity. Nat Biotechnol (2022).

### EQUIVALENTS AND SCOPE

[0373] In the claims articles such as “a,” “an,” and “the” may mean one or more than one unless indicated to the contrary or otherwise evident from the context. Claims or descriptions that include “or” between one or more members of a group are considered satisfied if one, more than one, or all of the group members are present in, employed in, or otherwise relevant to a given product or process unless indicated to the contrary or otherwise evident from the context. The invention includes embodiments in which exactly one member of the group is present in, employed in, or otherwise relevant to a given product or process. The invention includes embodiments in which more than one, or all of the group members are present in, employed in, or otherwise relevant to a given product or process.

[0374] Furthermore, the invention encompasses all variations, combinations, and permutations in which one or more limitations, elements, clauses, and descriptive terms from one or more of the listed claims is introduced into another claim. For example, any claim that is dependent on another claim may be modified to include one or more limitations found in any other claim that is dependent on the same base claim. Where elements are presented as lists, e.g., in Markush group format, each subgroup of the elements is also disclosed, and any element(s) may be removed from the group. It should it be understood that, in general, where the invention, or aspects of the invention, is/are referred to as comprising particular elements and/or features, certain embodiments of the invention or aspects of the invention consist, or consist essentially of, such elements and/or features. For purposes of simplicity, those embodiments have not been specifically set forth in haec verba herein. It is also noted that the terms “comprising” and “containing” are intended to be open and permits the inclusion of additional elements or steps. Where ranges are given, endpoints are included. Furthermore, unless otherwise indicated or otherwise evident from the context and understanding of one of ordinary skill in the art, values that are expressed as ranges can assume any specific value or sub-range within the stated ranges in different embodiments of the invention, to the tenth of the unit of the lower limit of the range, unless the context clearly dictates otherwise.

[0375] This application refers to various issued patents, published patent applications, journal articles, and other publications, all of which are incorporated herein by reference. If there is a conflict between any of the incorporated references and the instant specification, the specification shall control. In addition, any particular embodiment of the present invention that falls within the prior art may be explicitly excluded from any one or more of the claims. Because such embodiments are deemed to be known to one of ordinary skill in the art, they may be excluded even if the exclusion is not set forth explicitly herein. Any particular embodiment of the invention may be excluded from any claim, for any reason, whether or not related to the existence of prior art.

[0376] Those skilled in the art will recognize or be able to ascertain using no more than routine experimentation many equivalents to the specific embodiments described herein. The scope of the present embodiments described herein is not intended to be limited to the above Description, but rather is as set forth in the appended claims. Those of ordinary skill in the art will appreciate that various changes and modifications to this description may be made without departing from the spirit or scope of the present invention, as defined in the following claims.

The application's sequence listing, which the Patent Office published only in electronic form, follows.

SEQUENCE LISTING (2491 sequences)

SEQ ID NO: 1 - protein, 1368 aa, Streptococcus pyogenes [sequence omitted]

SEQ ID NO: 2 - protein, 84 aa, synthetic construct
MTNLSDIIEKETGKQLVIQESILMLPEEVEEVIGNKPESDILVHTAYDESTDENVMLLTSDAPEYKPWALVIQDSNGENKIKML

SEQ ID NO: 3 - DNA, 20 bp, synthetic construct
  source 1..20: mol_type = other DNA
ctgatccgaagtcagacgcc

SEQ ID NO: 4 - DNA, 20 bp, synthetic construct
  source 1..20: mol_type = other DNA
tctgcagtcaaatgctctac

SEQ ID NO: 5 - DNA, 21 bp, synthetic construct
  source 1..21: mol_type = other DNA
ttgatttgcagtcaaatgctc

SEQ ID NO: 6 - DNA, 20 bp, synthetic construct
  source 1..20: mol_type = other DNA
ggattcagagtccagagtgc

SEQ ID NO: 7 - DNA, 20 bp, synthetic construct
  source 1..20: mol_type = other DNA
tggattcaaagcccagagtg

SEQ ID NO: 8 - DNA, 20 bp, synthetic construct
  source 1..20: mol_type = other DNA
cgctctcaccgccgcggccc

SEQ ID NO: 9 - DNA, 20 bp, synthetic construct
  source 1..20: mol_type = other DNA
ggttttcacccaggtggccc

SEQ ID NO: 10 - DNA, 20 bp, synthetic construct
  source 1..20: mol_type = other DNA
ttgccttccaagcagttgac

SEQ ID NO: 11 - DNA, 20 bp, synthetic construct
  source 1..20: mol_type = other DNA
gactccagatcagaaggctg

SEQ ID NO: 12 - DNA, 20 bp, synthetic construct
  source 1..20: mol_type = other DNA
ctacagtcctccgctctacc

SEQ ID NO: 13 - DNA, 20 bp, synthetic construct
  source 1..20: mol_type = other DNA
gatttcaagtccaacgcctt

SEQ ID NO: 14 - DNA, 20 bp, synthetic construct
  source 1..20: mol_type = other DNA
gatttcgagtccaacacctt

SEQ ID NO: 15 - DNA, 20 bp, synthetic construct
  source 1..20: mol_type = other DNA
actatagctacttcctcagt

SEQ ID NO: 16 - DNA, 20 bp, synthetic construct
  source 1..20: mol_type = other DNA
ggacttaagatccaatgggc

SEQ ID NO: 17 - protein, 198 aa, Homo sapiens [sequence omitted]

SEQ ID NO: 18 - protein, 198 aa, Mus musculus
MDSLLMKQKKFLYHFKNVRWAKGRHETYLCYVVKRRDSATSCSLDFGHLRNKSGCHVELLFLRYISDWDLDPGRCYRVTWFTSWSPCYDCARHVAEFLRWNPNLSLRIFTARLYFCEDRKAEPEGLRRLHRAGVQIGIMTFKDYFYCWNTFVENRERTFKAWEGLHENSVRLTRQLRRILLPLYEVDDLRDAFRMLGF

SEQ ID NO: 19 - protein, 198 aa, unidentified
  source 1..198: note = Canis familiaris
MDSLLMKQRKFLYHFKNVRWAKGRHETYLCYVVKRRDSATSFSLDFGHLRNKSGCHVELLFLRYISDWDLDPGRCYRVTWFTSWSPCYDCARHVADFLRGYPNLSLRIFAARLYFCEDRKAEPEGLRRLHRAGVQIAIMTFKDYFYCWNTFVENREKTFKAWEGLHENSVRLSRQLRRILLPLYEVDDLRDAFRTLGL

SEQ ID NO: 20 - protein, 199 aa, Bos taurus
MDSLLKKQRQFLYQFKNVRWAKGRHETYLCYVVKRRDSPTSFSLDFGHLRNKAGCHVELLFLRYISDWDLDPGRCYRVTWFTSWSPCYDCARHVADFLRGYPNLSLRIFTARLYFCDKERKAEPEGLRRLHRAGVQIAIMTFKDYFYCWNTFVENHERTFKAWEGLHENSVRLSRQLRRILLPLYEVDDLRDAFRTLGL

SEQ ID NO: 21 - protein, 429 aa, Mus musculus
MGPFCLGCSHRKCYSPIRNLISQETFKFHFKNLGYAKGRKDTFLCYEVTRKDCDSPVSLHHGVFKNKDNIHAEICFLYWFHDKVLKVLSPREEFKITWYMSWSPCFECAEQIVRFLATHHNLSLDIFSSRLYNVQDPETQQNLCRLVQEGAQVAAMDLYEFKKCWKKFVDNGGRRFRPWKRLLTNFRYQDSKLQEILRPCYIPVPSSSSSTLSNICLTKGLPETRFCVEGRRMDPLSEEEFYSQFYNQRVKHLCYYHRMKPYLCYQLEQFNGQAPLKGCLLSEKGKQHAEILFLDKIRSMELSQVTITCYLTWSPCPNCAWQLAAFKRDRPDLILHIYTSRLYFHWKRPFQKGLCSLWQSGILVDVMDLPQFTDCWTNFVNPKRPFWPWKGLEIISRRTQRRLRRIKESWGLQDLVNDFGNLQLGPPMS

SEQ ID NO: 22 - protein, 429 aa, Rattus norvegicus
MGPFCLGCSHRKCYSPIRNLISQETFKFHFKNLRYAIDRKDTFLCYEVTRKDCDSPVSLHHGVFKNKDNIHAEICFLYWFHDKVLKVLSPREEFKITWYMSWSPCFECAEQVLRFLATHHNLSLDIFSSRLYNIRDPENQQNLCRLVQEGAQVAAMDLYEFKKCWKKFVDNGGRRFRPWKKLLTNFRYQDSKLQEILRPCYIPVPSSSSSTLSNICLTKGLPETRFCVERRRVHLLSEEEFYSQFYNQRVKHLCYYHGVKPYLCYQLEQFNGQAPLKGCLLSEKGKQHAEILFLDKIRSMELSQVIITCYLTWSPCPNCAWQLAAFKRDRPDLILHIYTSRLYFHWKRPFQKGLCSLWQSGILVDVMDLPQFTDCWTNFVNPKRPFWPWKGLEIISRRTQRRLHRIKESWGLQDLVNDFGNLQLGPPMS

SEQ ID NO: 23 - protein, 370 aa, unidentified
  source 1..370: note = Macca mulatta
MVEPMDPRTFVSNFNNRPILSGLNTVWLCCEVKTKDPSGPPLDAKIFQGKVYSKAKYHPEMRFLRWFHKWRQLHHDQEYKVTWYVSWSPCTRCANSVATFLAKDPKVTLTIFVARLYYFWKPDYQQALRILCQKRGGPHATMKIMNYNEFQDCWNKFVDGRGKPFKPRNNLPKHYTLLQATLGELLRHLMDPGTFTSNFNNKPWVSGQHETYLCYKVERLHNDTWVPLNQHRGFLRNQAPNIHGFPKGRHAELCFLDLIPFWKLDGQQYRVTCFTSWSPCFSCAQEMAKFISNNEHVSLCIFAARIYDDQGRYQEGLRALHRDGAKIAMMNYSEFEYCWDTFVDRQGRPFQPWDGLDEHSQALSGRLRAI

SEQ ID NO: 24 - protein, 384 aa, Pan troglodytes
MKPHFRNPVERMYQDTFSDNFYNRPILSHRNTVWLCYEVKTKGPSRPPLDAKIFRGQVYSKLKYHPEMRFFHWFSKWRKLHRDQEYEVTWYISWSPCTKCTRDVATFLAEDPKVTLTIFVARLYYFWDPDYQEALRSLCQKRDGPRATMKIMNYDEFQHCWSKFVYSQRELFEPWNNLPKYYILLHIMLGEILRHSMDPPTFTSNFNNELWVRGRHETYLCYEVERLHNDTWVLLNQRRGFLCNQAPHKHGFLEGRHAELCFLDVIPFWKLDLHQDYRVTCFTSWSPCFSCAQEMAKFISNNKHVSLCIFAARIYDDQGRCQEGLRTLAKAGAKISIMTYSEFKHCWDTFVDHQGCPFQPWDGLEEHSQALSGRLRAILQNQGN

SEQ ID NO: 25 - protein, 377 aa, Chlorocebus sabaeus
MNPQIRNMVEQMEPDIFVYYFNNRPILSGRNTVWLCYEVKTKDPSGPPLDANIFQGKLYPEAKDHPEMKFLHWFRKWRQLHRDQEYEVTWYVSWSPCTRCANSVATFLAEDPKVTLTIFVARLYYFWKPDYQQALRILCQERGGPHATMKIMNYNEFQHCWNEFVDGQGKPFKPRKNLPKHYTLLHATLGELLRHVMDPGTFTSNFNNKPWVSGQRETYLCYKVERSHNDTWVLLNQHRGFLRNQAPDRHGFPKGRHAELCFLDLIPFWKLDDQQYRVTCFTSWSPCFSCAQKMAKFISNNKHVSLCIFAARIYDDQGRCQEGLRTLHRDGAKIAVMNYSEFEYCWDTFVDRQGRPFQPWDGLDEHSQALSGRLRAI

SEQ ID NO: 26 - protein, 384 aa, Homo sapiens
MKPHFRNTVERMYRDTFSYNFYNRPILSRRNTVWLCYEVKTKGPSRPPLDAKIFRGQVYSELKYHPEMRFFHWFSKWRKLHRDQEYEVTWYISWSPCTKCTRDMATFLAEDPKVTLTIFVARLYYFWDPDYQEALRSLCQKRDGPRATMKIMNYDEFQHCWSKFVYSQRELFEPWNNLPKYYILLHIMLGEILRHSMDPPTFTFNFNNEPWVRGRHETYLCYEVERMHNDTWVLLNQRRGFLCNQAPHKHGFLEGRHAELCFLDVIPFWKLDLDQDYRVTCFTSWSPCFSCAQEMAKFISKNKHVSLCIFTARIYDDQGRCQEGLRTLAEAGAKISIMTYSEFKHCWDTFVDHQGCPFQPWDGLDEHSQDLSGRLRAILQNQEN

SEQ ID NO: 27 - protein, 373 aa, Homo sapiens
MKPHFRNTVERMYRDTFSYNFYNRPILSRRNTVWLCYEVKTKGPSRPRLDAKIFRGQVYSQPEHHAEMCFLSWFCGNQLPAYKCFQITWFVSWTPCPDCVAKLAEFLAEHPNVTLTISAARLYYYWERDYRRALCRLSQAGARVKIMDDEEFAYCWENFVYSEGQPFMPWYKFDDNYAFLHRTLKEILRNPMEAMYPHIFYFHFKNLRKAYGRNESWLCFTMEVVKHHSPVSWKRGVFRNQVDPETHCHAERCFLSWFCDDILSPNTNYEVTWYTSWSPCPECAGEVAEFLARHSNVNLTIFTARLYYFWDTDYQEGLRSLSQEGASVEIMGYKDFKYCWENFVYNDDEPFKPWKGLKYNFLFLDSKLQEILE

SEQ ID NO: 28 - protein, 382 aa, Homo sapiens
MNPQIRNPMERMYRDTFYDNFENEPILYGRSYTWLCYEVKIKRGRSNLLWDTGVFRGQVYFKPQYHAEMCFLSWFCGNQLPAYKCFQITWFVSWTPCPDCVAKLAEFLSEHPNVTLTISAARLYYYWERDYRRALCRLSQAGARVTIMDYEEFAYCWENFVYNEGQQFMPWYKFDENYAFLHRTLKEILRYLMDPDTFTFNFNNDPLVLRRRQTYLCYEVERLDNGTWVLMDQHMGFLCNEAKNLLCGFYGRHAELRFLDLVPSLQLDPAQIYRVTWFISWSPCFSWGCAGEVRAFLQENTHVRLRIFAARIYDYDPLYKEALQMLRDAGAQVSIMTYDEFEYCWDTFVYRQGCPFQPWDGLEEHSQALSGRLRAILQNQGN

SEQ ID NO: 29 - protein, 190 aa, Homo sapiens
MNPQIRNPMKAMYPGTFYFQFKNLWEANDRNETWLCFTVEGIKRRSVVSWKTGVFRNQVDSETHCHAERCFLSWFCDDILSPNTKYQVTWYTSWSPCPDCAGEVAEFLARHSNVNLTIFTARLYYFQYPCYQEGLRSLSQEGVAVEIMDYEDFKYCWENFVYNDNEPFKPWKGLKTNFRLLKRRLRESLQ

SEQ ID NO: 30 - protein, 199 aa, Homo sapiens
MEASPASGPRHLMDPHIFTSNFNNGIGRHKTYLCYEVERLDNGTSVKMDQHRGFLHNQAKNLLCGFYGRHAELRFLDLVPSLQLDPAQIYRVTWFISWSPCFSWGCAGEVRAFLQENTHVRLRIFAARIYDYDPLYKEALQMLRDAGAQVSIMTYDEFKHCWDTFVDHQGCPFQPWDGLDEHSQALSGRLRAILQNQGN

SEQ ID NO: 31 - protein, 200 aa, Homo sapiens
MALLTAETFRLQFNNKRRLRRPYYPRKALLCYQLTPQNGSTPTRGYFENKKKCHAEICFINEIKSMGLDETQCYQVTCYLTWSPCSSCAWELVDFIKAHDHLNLGIFASRLYYHWCKPQQKGLRLLCGSQVPVEVMGFPKFADCWENFVDHEKPLSFNPYKMLEELDKNSRAIKRRLERIKIPGVRAQGRYMDILCDAEV

SEQ ID NO: 32 - protein, 386 aa, Homo sapiens
MNPQIRNPMERMYRDTFYDNFENEPILYGRSYTWLCYEVKIKRGRSNLLWDTGVFRGPVLPKRQSNHRQEVYFRFENHAEMCFLSWFCGNRLPANRRFQITWFVSWNPCLPCVVKVTKFLAEHPNVTLTISAARLYYYRDRDWRWVLLRLHKAGARVKIMDYEDFAYCWENFVCNEGQPFMPWYKFDDNYASLHRTLKEILRNPMEAMYPHIFYFHFKNLLKACGRNESWLCFTMEVTKHHSAVFRKRGVFRNQVDPETHCHAERCFLSWFCDDILSPNTNYEVTWYTSWSPCPECAGEVAEFLARHSNVNLTIFTARLCYFWDTDYQEGLCSLSQEGASVKIMGYKDFVSCWKNFVYSDDEPFKPWKGLQTNFRLLKRRLREILQ

SEQ ID NO: 33 - protein, 236 aa, Homo sapiens
MTSEKGPSTGDPTLRRRIEPWEFDVFYDPRELRKEACLLYEIKWGMSRKIWRSSGKNTTNHVEVNFIKKFTSERDFHPSMSCSITWFLSWSPCWECSQAIREFLSRHPGVTLVIYVARLFWHMDQQNRQGLRDLVNSGVTIQIMRASEYYHCWRNFVNYPPGDEAHWPQYPPLWMMLYALELHCIILSLPPCLKISRRWQNHLTFFRLHLQNCHYQTIPPHILLATGLIHPSVAWR

SEQ ID NO: 34 - protein, 229 aa, Mus musculus
MSSETGPVAVDPTLRRRIEPHEFEVFFDPRELRKETCLLYEINWGGRHSVWRHTSQNTSNHVEVNFLEKFTTERYFRPNTRCSITWFLSWSPCGECSRAITEFLSRHPYVTLFIYIARLYHHTDQRNRQGLRDLISSGVTIQIMTEQEYCYCWRNFVNYPPSNEAYWPRYPHLWVKLYVLELYCIILGLPPCLKILRRKQPQLTFFTITLQTCHYQRIPPHLLWATGLK

SEQ ID NO: 35 - protein, 229 aa, Rattus norvegicus [sequence omitted]

SEQ ID NO: 36 - protein, 208 aa, Petromyzon marinus
MTDAEYVRIHEKLDIYTFKKQFFNNKKSVSHRCYVLFELKRRGERRACFWGYAVNKPQSGTERGIHAEIFSIRKVEEYLRDNPGQFTINWYSSWSPCADCAEKILEWYNQELRGNGHTLKIWACKLYYEKNARNQIGLWNLRDNGVGLNVMVSEHYQCCRKIFIQSSHNQLNENRWLEKTLKRAEKRRSELSIMIQVKILHTTKSPAV

SEQ ID NO: 37 - protein, 208 aa, synthetic construct
MTDAEYVRIHEKLDIYTFKKQFSNNKKSVSHRCYVLFELKRRGERRACFWGYAVNKPQSGTERGIHAEIFSIRKVEEYLRDNPGQFTINWYSSWSPCADCAEKILEWYNQELRGNGHTLKIWVCKLYYEKNARNQIGLWNLRDNGVGLNVMVSEHYQCCRKIFIQSSHNQLNENRWLEKTLKRAEKRRSELSIMFQVKILHTTKSPAV

SEQ ID NO: 38 - protein, 384 aa, Homo sapiens
MKPHFRNTVERMYRDTFSYNFYNRPILSRRNTVWLCYEVKTKGPSRPPLDAKIFRGQVYSELKYHPEMRFFHWFSKWRKLHRDQEYEVTWYISWSPCTKCTRDMATFLAEDPKVTLTIFVARLYYFWDPDYQEALRSLCQKRDGPRATMKIMNYDEFQHCWSKFVYSQRELFEPWNNLPKYYILLHIMLGEILRHSMDPPTFTFNFNNEPWVRGRHETYLCYEVERMHNDTWVLLNQRRGFLCNQAPHKHGFLEGRHAELCFLDVIPFWKLDLDQDYRVTCFTSWSPCFSCAQEMAKFISKNKHVSLCIFTARIYRRQGRCQEGLRTLAEAGAKISIMTYSEFKHCWDTFVDHQGCPFQPWDGLDEHSQDLSGRLRAILQNQEN

SEQ ID NO: 39 - protein, 184 aa, Homo sapiens
MDPPTFTFNFNNEPWVRGRHETYLCYEVERMHNDTWVLLNQRRGFLCNQAPHKHGFLEGRHAELCFLDVIPFWKLDLDQDYRVTCFTSWSPCFSCAQEMAKFISKNKHVSLCIFTARIYDDQGRCQEGLRTLAEAGAKISIMTYSEFKHCWDTFVDHQGCPFQPWDGLDEHSQDLSGRLRAILQ

SEQ ID NO: 40 - protein, 184 aa, Homo sapiens
MDPPTFTFNFNNEPWVRGRHETYLCYEVERMHNDTWVLLNQRRGFLCNQAPHKHGFLEGRHAELCFLDVIPFWKLDLDQDYRVTCFTSWSPCFSCAQEMAKFISKNKHVSLCIFTARIYRRQGRCQEGLRTLAEAGAKISIMTYSEFKHCWDTFVDHQGCPFQPWDGLDEHSQDLSGRLRAILQ

SEQ ID NO: 41 - protein, 229 aa, synthetic construct
MSSKTGPVAVDPTLRRRIEPHEFEVFFDPRELRKETCLLYEINWGGRHSIWRHTSQNTNKHVEVNFIEKFTTERYFCPNTRCSITWFLSWSPCGECSRAITEFLSRYPNVTLFIYIARLYHLANPRNRQGLRDLISSGVTIQIMTEQESGYCWHNFVNYSPSNESHWPRYPHLWVRLYVLELYCIILGLPPCLNILRRKQSQLTSFTIALQSCHYQRLPPHILWATGLK

SEQ ID NO: 42 - protein, 229 aa, synthetic construct
MSSETGPVAVDPTLRRRIEPHEFEVFFDPRELRKETCLLYEINWGGRHSIWRHTSQNTNKHVEVNFIEKFTTERYFCPNTRCSITWFLSYSPCGECSRAITEFLSRYPHVTLFIYIARLYHHADPENRQGLRDLISSGVTIQIMTEQESGYCWRNFVNYSPSNEAHWPRYPHLWVRLYVLELYCIILGLPPCLNILRRKQPQLTFFTIALQSCHYQRLPPHILWATGLK

SEQ ID NO: 43 - protein, 229 aa, synthetic construct
MSSETGPVAVDPTLRRRIEPHEFEVFFDPRELRKETCLLYEINWGGRHSIWRHTSQNTNKHVEVNFIEKFTTERYFCPNTRCSITWFLSYSPCGECSRAITEFLSRYPHVTLFIYIARLYHHADPRNRQGLEDLISSGVTIQIMTEQESGYCWRNFVNYSPSNEAHWPRYPHLWVRLYVLELYCIILGLPPCLNILRRKQPQLTFFTIALQSCHYQRLPPHILWATGLK

SEQ ID NO: 44 - protein, 229 aa, synthetic construct
MSSETGPVAVDPTLRRRIEPHEFEVFFDPRELRKETCLLYEINWGGRHSIWRHTSQNTNKHVEVNFIEKFTTERYFCPNTRCSITWFLSYSPCGECSRAITEFLSRYPHVTLFIYIARLYHHADPENRQGLEDLISSGVTIQIMTEQESGYCWRNFVNYSPSNEAHWPRYPHLWVRLYVLELYCIILGLPPCLNILRRKQPQLTFFTIALQSCHYQRLPPHILWATGLK

SEQ ID NO: 45 - protein, 229 aa, synthetic construct
MSSETGPVAVDPTLRRRIEPHEFEVFFDPRELRKETCLLYEINWGGRHSIWRHTSQNTNKHVEVNFIEKFTTERYFCPNTRCSITWFLSWSPCGECSRAITEFLSRYPHVTLFIYIARLYHHADPENRQGLEDLISSGVTIQIMTEQESGYCWRNFVNYSPSNEAHWPRYPHLWVRLYVLELYCIILGLPPCLNILRRKQPQLTFFTIALQSCHYQRLPPHILWATGLK

SEQ ID NO: 46 - protein, 229 aa, synthetic construct
MSSETGPVAVDPTLRRRIEPHEFEVFFDPRELAKETCLLYEINWGGRHSIWRHTSQNTNKHVEVNFIEKFTTERYFCPNTRCSITWFLSWSPCGECSRAITEFLSRYPHVTLFIYIARLYHHADPRNRQGLRDLISSGVTIQIMTEQESGYCWRNFVNYSPSNEAHWPRYPHLWVRLYVLELYCIILGLPPCLNILRRKQPQLTFFTIALQSCHYQRLPPHILWATGLK

SEQ ID NO: 47 - protein, 229 aa, synthetic construct
MSSETGPVAVDPTLRRRIEPHEFEVFFDPRELAAETCLLYEINWGGRHSIWRHTSQNTNKHVEVNFIEKFTTERYFCPNTRCSITWFLSWSPCGECSRAITEFLSRYPHVTLFIYIARLYHHADPRNRQGLRDLISSGVTIQIMTEQESGYCWRNFVNYSPSNEAHWPRYPHLWVRLYVLELYCIILGLPPCLNILRRKQPQLTFFTIALQSCHYQRLPPHILWATGLK

SEQ ID NO: 48 - protein, 229 aa, synthetic construct
MSSETGPVAVDPTLRRRIEPHEFEVFFDPRELAAETCLLYEINWGGRHSIWRHTSQNTNKHVEVNFIEKFTTERYFCPNTRCSITWFLSWSPCGECSRAITEFLSRYPHVTLFIYIARLYHLANPRNRQGLRDLISSGVTIQIMTEQESGYCWRNFVNYSPSNEAHWPRYPHLWVRLYVLELYCIILGLPPCLNILRRKQPQLTFFTIALQSCHYQRLPPHILWATGLK

SEQ ID NO: 49 - protein, 162 aa, synthetic construct
MFERNYDPRELRKETYLLYEIKWGKSGKLWRHWCQNNRTQHAEVYFLENIFNARRFNPSTHCSITWYLSWSPCAECSQKIVDFLKEHPNVNLEIYVARLYYHEDERNRQGLRDLVNSGVTIRIMDLPDYNYCWKTFVSDQGGDEDYWPGHFAPWIKQYSLKL

SEQ ID NO: 50 - protein, 162 aa, synthetic construct
MFERNYDPRELRKETYLLYEIKWGKSGKLWRHWCQNNRTQHAEVYFLENIFNARRFNPSTHCSITWYLSWSPCAECSQKIVDFLKEHPNVNLEIYVARLYYPENERNRQGLRDLVNSGVTIRIMDLPDYNYCWKTFVSDQGGDEDYWPGHFAPWIKQYSLKL

SEQ ID NO: 51 - protein, 166 aa, synthetic construct
SEVEFSHEYWMRHALTLAKRAWDEREVPVGAVLVHNNRVIGEGWNRPIGRHDPTAHAEIMALRQGGLVMQNYRLIDATLYVTLEPCVMCAGAMIHSRIGRVVFGARDAKTGAAGSLMDVLHHPGMNHRVEITEGILADECAALLSDFFRMRRQEIKAQKKAQSSTD

SEQ ID NO: 52 - protein, 166 aa, synthetic construct
SEVEFSHEYWMRHALTLAKRAWDEREVPVGAVLVHNNRVIGEGWNRPIGRHDPTAHAEIMALRQGGLVMQNYRLIDATLYVTLEPCVMCAGAMIHSRIGRVVFGARNAKTGAAGSLMDVLHHPGMNHRVEITEGILADECAALLSDFFRMRRQEIKAQKKAQSSTD

SEQ ID NO: 53 - protein, 166 aa, synthetic construct
SEVEFSHEYWMRHALTLAKRAWDEREVPVGAVLVHNNRVIGEGWNRPIGRHDPTAHAEIMALRQGGLVMQNYRLIDATLYVTLEPCVMCAGAMIHSRIGRVVFGARGAKTGAAGSLMDVLHHPGMNHRVEITEGILADECAALLSDFFRMRRQEIKAQKKAQSSTD

SEQ ID NO: 54 - protein, 166 aa, synthetic construct
SEVEFSHEYWMRHALTLAKRAWDEREVPVGAVLVHNNRVIGEGWNRPIGRHDPTAHAEIMALRQGGLVMQNYRLIDATLYVTLEPCVMCAGAMIHSRIGRVVFGARVAKTGAAGSLMDVLHHPGMNHRVEITEGILADECAALLSDFFRMRRQEIKAQKKAQSSTD

SEQ ID NO: 55 - protein, 166 aa, synthetic construct
SEVEFSYEYWMRHALTLAKRAWDEREVPVGAVLVHNNRVIGEGWNRPIGRHDPTAHAEIMALRQGGLVMQNYRLIDATLYVTLEPCVMCAGAMIHSRIGRVVFGARNAKTGAAGSLMDVLHHPGMSHRVEITEGILADECAALLSDFFRMRRQEIKAQKKAQSSTD

SEQ ID NO: 56 - protein, 166 aa, synthetic construct
SEVEFSYEYWMRHALTLAKRAWDEREVPVGAVLVHNNRVIGEGWNRPIGRHDPTAHAEIMALRQGGLVMQNYRLIDATLYVTLEPCVMCAGAMIHSRIGRVVFGARNAKTGAAGSLMDVLHHPGMSHRVEITEGILADECAALLSDFFRMRRQDIKAQKKAQSSTD

SEQ ID NO: 57 - protein, 166 aa, synthetic construct
SEVEFSYEYWMRHALTLAKRAWDEREVPVGAVLVHNNRVIGEGWNRPIGRHDPTAHAEIMALRQGGLVMQNYRLIDATLYVTLEPCVMCAGAMIHSRIGRVVFGARNAKTGAAGSLMDVLHHPGMSHRVEITEGILADECAALLSDFFRMRRQGIKAQKKAQSSTD

SEQ ID NO: 58 - protein, 166 aa, synthetic construct
SEVEFSYEYWMRHALTLAKRAWDEREVPVGAVLVHNNRVIGEGWNRPIGRHDPTAHAEIMALRQGGLVMQNYRLIDATLYVTLEPCVMCAGAMIHSRIGRVVFGARNAKTGAAGSLMDVLHHPGMSHRVEITEGILADECAALLSDFFRMRRQVIKAQKKAQSSTD

SEQ ID NO: 59 - protein, 166 aa, synthetic construct
SEVEFSHEYWMRHALTLAKRAWDEREVPVGAVLVHNNRVIGEGWNRPIGRHDPTAHAEIMALRQGGLVMQNYRLIDATLYVTLEPCVMCAGAMIHSRIGRVVFGVRNAKTGAAGSLMDVLHHPGMNHRVEITEGILADECAALLSYFFRMRRQVIKAQKKAQSSTD

SEQ ID NO: 60 - protein, 166 aa, synthetic construct
AEVEFSHEYWMRHALTLAKRAWDEREVPVGAVLVHNNRVIGEGWNRPFGRHDPTAHAEIMALRQGGLVMQNYRLIDATLYVTLEPCVMCAGAMIHSRIGRVVFGVRNAKTGAAGSLMDVLHHPGMNHRVEITEGILADECAALLSYFFRMRRQVIKAQKKAQSSTD

SEQ ID NO: 61 - protein, 166 aa, synthetic construct
SEVEFSYEYWMRHALTLAKRAWDEREVPVGAVLVHNNRVIGEGWNRPIGRHDPTAHAEIMALRQGGLVMQNYRLIDATLYVTLEPCVMCAGAMIHSRIGRVVFGTRNAKTGAAGSLMDVLHHPGMSHRVEITEGILADECAALLSDFFRMRRQEIKAQSKAQSSTD

SEQ ID NO: 62 - protein, 166 aa, synthetic construct
SEVEFSHEYWMRHALTLAKRAWDEGEVPVGAVLVHNNRVIGEGWNRPIGRHDPTAHAEIMALRQGGLVMQNYRLIDATLYVTFEPCVMCAGAMIHSRIGRVVFGVHNAKTGAAGSLMDVLHYPGMNHRVEITEGILADECNDLLSYFFRMRRQVFKAQKKAQSSTD

SEQ ID NO: 63 - protein, 166 aa, synthetic construct
SEVEFSHEYWMRHALTLAKRAWDGGEVPVGAVLVHNNRVIGEGWNRPIGRHDPTAHAEIMALRQGGLVMQNYRLIDATLYVTFEPCVMCAGAMIHSRIGRVVFGVHNAKTGAAGSLMDVLHYPGMNHRVEITEGILADECNDLLSYFFRMRRQVFKAQKKAQSSTD

SEQ ID NO: 64 - protein, 166 aa, synthetic construct
SEVEFSHEYWMRHALTLAKRAWDDGEVPVGAVLVHNNRVIGEGWNRPIGRHDPTAHAEIMALRQGGLVMQNYRLIDATLYVTFEPCVMCAGAMIHSRIGRVVFGVKNAKTGAAGSLMDVLHYPGMNHRVEITEGILADECNGLLSYFFRMRRQVFKAQKKAQSSTD

SEQ ID NO: 65 - protein, 166 aa, synthetic construct
SEVEFSHEYWMRHALTLAKRAWDEQEVPVGAVLVHNNRVIGEGWNRPIGRHDPTAHAEIMALRQGGLVMQNYRLIDATLYVTFEPCVMCAGAMIHSRIGRVVFGVRNAKTGAAGSLMDVLHYPGMNHRVEITEGILADECNALLSYFFRMRRQVFKAQKKAQSSTD

SEQ ID NO: 66 - protein, 166 aa, synthetic construct
SEVEFSHEYWMRHALTLAKRAWDMGEVPVGAVLVHNNRVIGEGWNRPIGRHDPTAHAEIMALRQGGLVMQNYRLIDATLYVTFEPCVMCAGAMIHSRIGRVVFGVPNAKTGAAGSLMDVLHYPGMNHRVEITEGILADECNDLLSYFFRMRRQVFKAQKKAQSSTD

SEQ ID NO: 67 - protein, 166 aa, synthetic construct
SEVEFSHEYWMRHALTLAKRAWDECEVPVGAVLVHNNRVIGEGWNRPIGRHDPTAHAEIMALRQGGLVMQNYRLIDATLYVTFEPCVMCAGAMIHSRIGRVVFGVHNAKTGAAGSLMDVLHYPGMNHRVEITEGILADECNALLSYFFRMRRQVFKAQKKAQSSTD

SEQ ID NO: 68 - protein, 166 aa, synthetic construct
SEVEFSHEYWMRHALTLAKRAWDEREVPVGAVLVHNNRVIGEGWNRPIGRHDPTAHAEIMALRQGGLVMQNYRLIDATLYVTFEPCVMCAGAMIHSRIGRVVFGVRNAKTGAAGSLMDVLHYPGMNHRVEITEGILADECNLLLSYFFRMRRQVFKAQKKAQSSTD

SEQ ID NO: 69 - protein, 165 aa, synthetic construct
EVEFSHEYWMRHALTLAKRAWDEGEVPVGAVLVHNNRVIGEGWNRPIGRHDPTAHAEIMALRQGGLVMQNYRLIDATLYVTFEPCVMCAGAMIHSRIGRVVFGVRNAKTGAAGSLMDVLHYPGMNHRVEITEGILADECNALLSYFFRMRRQVFKAQKKAQSSTD

SEQ ID NO: 70 - protein, 166 aa, synthetic construct
SEVEFSHEYWMRHALTLAKRAWDEREVPVGAVLVHNNRVIGEGWNRPIGHHDPTAHAEIMALRQGGLVMQNYRLIDATLYVTFEPCVMCAGAMIHSRIGRVVFGVRNAKTGAAGSLMDVLHYPGMNHRVEITEGILADECAALLSYFFRMRRQVFNAQKKAQSSTD

SEQ ID NO: 71 - protein, 166 aa, synthetic construct
SEVEFSHEYWMRHALTLAKRAWDAGEVPVGAVLVHNNRVIGEGWNRPIGRHDPTAHAEIMALRQGGLVMQNYRLIDATLYVTFEPCVMCAGAMIHSRIGRVVFGVNNAKTGAAGSLMDVLHYPGMNHRVEITEGILADECNELLSYFFRMRRQVFKAQKKAQSSTD

SEQ ID NO: 72 - protein, 166 aa, synthetic construct
SEVEFSHEYWMRHALTLAKRAWDEREVPVGAVLVHTNRVIGEGWNRTIGRHDPTAHAEIMALRQGGLVMQNYRLIDATLYVTFEPCVMCAGAMIHSRIGRVVFGVRNAKTGAAGSLMDVLHYPGMNHRVEITEGILADECAALLSYFFRMRRQVFKAQKKAQSSTD

SEQ ID NO: 73 - protein, 166 aa, synthetic construct
SEVEFSHEYWMRHALTLAKRAWDEREVPVGAVLVHSNRVIGEGWNRPIGRHDPTAHAEIMALRQGGLVMQNYRLIDATLYVTFEPCVMCAGAMIHSRIGRVVFGVRNAKTGAAGSLMDVLHYPGMNHRVEITEGILADECAALLSYFFRMRRQVFKAQKKAQSSTD

SEQ ID NO: 74 - protein, 166 aa, synthetic construct
SEVEFSHEYWMRHALTLAKRAWDEREVPVGAVLVLNNRVIGEGWNRPIGRHDPTAHAEIMALRQGGLVMQNYRLIDATLYVTFEPCVMCAGAMIHSRIGRVVFGVRNAKTGAAGSLMDVLHYPGMNHRVEITEGILADECAALLSYFFRMRRQVFKAQKKAQSSTD

SEQ ID NO: 75 - protein, 166 aa, synthetic construct
SEVEFSHEYWMRHALTLAKRAWDEREVPVGAVLVLNNRVIGEGWNRLIGRHDPTAHAEIMALRQGGLVMQNYRLIDATLYVTFEPCVMCAGAMIHSRIGRVVFGVRNAKTGAAGSLMDVLHYPGMNHRVEITEGILADECAALLSYFFRMRRQVFKAQKKAQSSTD

SEQ ID NO: 76 - protein, 166 aa, synthetic construct
SEVEFSHEYWMRHALTLAKRAWDEREVPVGAVLVLNNRVIGEGWNRPIGRHDPTAHAEIMALRQGGLVMQNYRLIDATLYVTFEPCVMCAGAMIHSRIGRVVFGVRNAKTGAAGSLMDVLHYPGMNHRVEITEGILADECAALLSYFFRMRRQVFNAQKKAQSSTD

SEQ ID NO: 77 - protein, 166 aa, synthetic construct
SEVEFSHEYWMRHALTLAKRAWDEREVPVGAVLVLNNRVIGEGWNRPIGRHDPTAHAEIMALRQGGLVMQNYRLIDATLYVTFEPCVMCAGAMIHSRIGRVVFGVRNAKTGAAGSLMDVLHYPGMNHRVEITEGILADECAALLCYFFRMRRQVFKAQKKAQSSTD

SEQ ID NO: 78 - protein, 166 aa, synthetic construct
SEVEFSHEYWMRHALTLAKRAWDEREVPVGAVLVHNNRVIGEGWNRPIGRHDPTAHAEIMALRQGGLVMQNYRLIDATLYVTFEPCVMCAGAMIHSRIGRVVFGVRNAKTGAAGSLMDVLHYPGMNHRVEITEGILADECAALLRYFFRMRRQVFKAQKKAQSSTD

SEQ ID NO: 79 - protein, 165 aa, synthetic construct
EVEFSHEYWMRHALTLAKRAWDEREVPVGAVLVHSNRVIGEGWNRPIGHHDPTAHAEIMALRQGGLVMQNYRLIDATLYVTFEPCVMCAGAMIHSRIGRVVFGVRNAKTGAAGSLMDVLHYPGMNHRVEITEGILADECAALLSYFFRMRRQVFKAQKKAQSSTD

SEQ ID NO: 80 - protein, 166 aa, synthetic construct
SEVEFSHEYWMRHALTLAKRAWDEREVPVGAVLVHNNRVIGEGWNRPIGLHDPTAHAEIMALRQGGLVMQNYRLIDATLYVTFEPCVMCAGAMIHSRIGRVVFGVRNAKTGAAGSLMDVLHYPGMNHRVEITEGILADECAALLSYFFRMRRQVFNAQKKAQSSTD

SEQ ID NO: 81 - protein, 159 aa, synthetic construct
GSHMTNDIYFMTLAIEEAKKAAQLGEVPIGAIITKDDEVIARAHNLRETLQQPTAHAEHIAIERAAKVLGSWRLEGCTLYVTLEPCVMCAGTIVMSRIPRVVYGADNPKGGCSGSLMNLLQQSNFNHRAIVDKGVLKEACSTLLTTFFKNLRANKKSTN

SEQ ID NO: 82 - protein, 159 aa, synthetic construct
GSHMTNDIYFMTLAIEEAKKAAQLGEVPIGAIITKDDEVIARAHNLRETLQQPTAHAEHIAIERAAKVLGSWRLEGCTLYVTLEPCVMCAGTIVMSRIPRVVYGAANPKGGCSGSLMNLLQQSNFNHRAIVDKGVLKEACSTLLTTFFKNLRANKKSTN

SEQ ID NO: 83 - protein, 159 aa, synthetic construct
GSHMTNDIYFMTLAIEEAKKAAQLPEVPIGAIITKDDEVIARAHNLRETLQQPTAHAEHIAIERAAKVLGSWRLEGCTLYVTLEPCVMCAGTIVMSRIPRVVYGAANPKGGCSGSLMNLLQQSNFNHRAIVDKGVLKEACSTLLTTFFKNLRANKKSTN

SEQ ID NO: 84 - protein, 159 aa, synthetic construct
GSHMTNDIYFMTLAIEEAKKAAQLPEVPIGAIITKDDEVIARAHNLRETLQQPTAHAEHIAIERAAKVLGSWRLEGCTLYVTLEPCVMCAGTIVMSRIPRVVYGAANPKGGCSGSLMNLLQQSNFNHRAIVDKGVLKEACATLLTTFFKNLRANKKSTN

SEQ ID NO: 85 - protein, 159 aa, synthetic construct
GSHMTNDIYFMTLAIEEAKKAAQLGEVPIGAIITKDDEVIARAHNLRETLQQPTAHAEHIAIERAAKVLGSWRLEGCTLYVTLEPCVMCAGTIVMSRIPRVVYGAANPKGGCSGSLMNLLQQSNFNHRAIVDKGVLKEACATLLTTFFKNLRANKKSTN

SEQ ID NO: 86 - protein, 166 aa, synthetic construct
SEVEFSHEYWMRHALTLAKRAWDEREVPVGAVLVHNNRVIGEGWNRSIGRHDPTAHAEIMALRQGGLVMQNYRLIDATLYVTLEPCVMCAGAMIHSRIGRVVFGARDAKTGAAGSLMDVLHHPGMNHRVEITEGILADECAALLSDFFRMRRQEIKAQKKAQSSTD

SEQ ID NO: 87 - protein, 166 aa, synthetic construct
SEVEFSHEYWMRHALTLAKRAWDEREVPVGAVLVHNNRVIGEGWNRTIGRHDPTAHAEIMALRQGGLVMQNYRLIDATLYVTLEPCVMCAGAMIHSRIGRVVFGARDAKTGAAGSLMDVLHHPGMNHRVEITEGILADECAALLSDFFRMRRQEIKAQKKAQSSTD

SEQ ID NO: 88 - protein, 166 aa, synthetic construct
SEVEFSHEYWMRHALTLAKRAWDEREVPVGAVLVHNNRVIGEGWNRAIGRHDPTAHAEIMALRQGGLVMQNYRLIDATLYVTLEPCVMCAGAMIHSRIGRVVFGARDAKTGAAGSLMDVLHHPGMNHRVEITEGILADECAALLSDFFRMRRQEIKAQKKAQSSTD

SEQ ID NO: 89 - protein, 166 aa, synthetic construct
SEVEFSHEYWMRHALTLAKRAWDEREVPVGAVLVHNNRVIGEGWNRPIGRHDPTAHAEIMALRQGGLVMQNYRLIDATLYVTLEPCVMCAGAMIHSRIGRVVFGARDAKTGAAGSLMDVLHHPGMNHRVEITEGILADECNALLSDFFRMRRQEIKAQKKAQSSTD

SEQ ID NO: 90 - protein, 165 aa, synthetic construct
EVEFSHEYWMRHALTLAKRARDEREVPVGAVLVHNNRVIGEGWNRPIGRHDPTAHAEIMALRQGGLVMQNYRLIDATLYVTLEPCVMCAGAMIHSRIGRVVFGARDAKTGAAGSLMDVLHHPGMNHRVEITEGILADECAALLSDFFRMRRQEIKAQKKAQSSTD

SEQ ID NO: 91 - protein, 166 aa, synthetic construct
SEVEFSHEYWMRHALTLAKRALDEREVPVGAVLVHNNRVIGEGWNRPIGRHDPTAHAEIMALRQGGLVMQNYRLIDATLYVTLEPCVMCAGAMIHSRIGRVVFGARDAKTGAAGSLMDVLHHPGMNHRVEITEGILADECAALLSDFFRMRRQEIKAQKKAQSSTD

SEQ ID NO: 92 - protein, 166 aa, synthetic construct
SEVEFSHEYWMRHALTLAKRAWDEREVPVGAVLVHNNRVIGEGWNRPIGRHDPTAHAEIMALRQGGLVMQNYRLIDATLYVTLEPCVMCAGAMIHSRIGRVVFGARDAKTGAAGSLMDVLHHPGMNHRVEITEGILADECAALLSDFFRMPRQEIKAQKKAQSSTD

SEQ ID NO: 93 - protein, 166 aa, synthetic construct
SEVEFSHEYWMRHALTLAKRAWDEREVPVGAVLVHNNRVIGEGWNRPIGRHDPTAHAEIMALRQGGLVMQNYRLIDATLYVTLEPCVMCAGAMIHSRIGRVVFGARDAKTGAAGSLMDVLHHPGMNHRVEITEGILADECAALLSDFFRMHRQEIKAQKKAQSSTD

SEQ ID NO: 94 - protein, 166 aa, synthetic construct
SEVEFSHEYWMRHALTLAKRAWDEREVPVGAVLVHNNRVIGEGWNRPIGRHDPTAHAEIMALRQGGLVMQNYRLIDATLYVTFEPCVMCAGAMIHSRIGRVVFGVRNAKTGAAGSLMDVLHYPGMNHRVEITEGILADECAALLSYFFRMRRQVFKAQKKAQSSTD

SEQ ID NO: 95 - protein, 166 aa, synthetic construct
SEVEFSHEYWMRHALTLAKRAWDEREVPVGAVLVLNNRVIGEGWNRPIGLHDPTAHAEIMALRQGGLVMQNYRLIDATLYVTFEPCVMCAGAMIHSRIGRVVFGVRNAKTGAAGSLMDVLHYPGMNHRVEITEGILADECAALLCYFFRMRRQVFNAQKKAQSSTD

SEQ ID NO: 96 - protein, 166 aa, synthetic construct
SEVEFSHEYWMRHALTLAKRAWDEREVPVGAVLVLNNRVIGEGWNRSIGLHDPTAHAEIMALRQGGLVMQNYRLIDATLYVTFEPCVMCAGAMIHSRIGRVVFGVRNAKTGAAGSLMDVLHYPGMNHRVEITEGILADECAALLCYFFRMRRQVFNAQKKAQSSTD

SEQ ID NO: 97 - protein, 166 aa, synthetic construct
SEVEFSHEYWMRHALTLAKRAWDEREVPVGAVLVLNNRVIGEGWNRAIGLHDPTAHAEIMALRQGGLVMQNYRLIDATLYVTFEPCVMCAGAMIHSRIGRVVFGVRNAKTGAAGSLMDVLHYPGMNHRVEITEGILADECAALLCYFFRMRRQVFNAQKKAQSSTD

SEQ ID NO: 98 - protein, 166 aa, synthetic construct
SEVEFSHEYWMRHALTLAKRALDEREVPVGAVLVLNNRVIGEGWNRAIGLHDPTAHAEIMALRQGGLVMQNYRLIDATLYVTFEPCVMCAGAMIHSRIGRVVFGVRNAKTGAAGSLMDVLHYPGMNHRVEITEGILADECAALLCYFFRMPRQVFNAQKKAQSSTD

SEQ ID NO: 99 - protein, 166 aa, synthetic construct
SEVEFSHEYWMRHALTLAKRARDEREVPVGAVLVLNNRVIGEGWNRAIGLHDPTAHAEIMALRQGGLVMQNYRLIDATLYVTFEPCVMCAGAMIHSRIGRVVFGVRNAKTGAAGSLMDVLHYPGMNHRVEITEGILADECAALLCYFFRMPRQVFNAQKKAQSSTD

SEQ ID NO: 100 - protein, 160 aa, Staphylococcus aureus
MGSHMTNDIYFMTLAIEEAKKAAQLGEVPIGAIITKDDEVIARAHNLRETLQQPTAHAEHIAIERAAKVLGSWRLEGCTLYVTLEPCVMCAGTIVMSRIPRVVYGADDPKGGCSGSLMNLLQQSNFNHRAIVDKGVLKEACSTLLTTFFKNLRANKKSTN

SEQ ID NO: 101 - protein, 161 aa, Bacillus subtilis
MTQDELYMKEAIKEAKKAEEKGEVPIGAVLVINGEIIARAHNLRETEQRSIAHAEMLVIDEACKALGTWRLEGATLYVTLEPCPMCAGAVVLSRVEKVVFGAFDPKGGCSGTLMNLLQEERFNHQAEVVSGVLEEECGGMLSAFFRELRKKKKAARKNLSE

SEQ ID NO: 102 - protein, 183 aa, unidentified
  source 1..183: note = Salmonella typhimurium
MPPAFITGVTSLSDVELDHEYWMRHALTLAKRAWDEREVPVGAVLVHNHRVIGEGWNRPIGRHDPTAHAEIMALRQGGLVLQNYRLLDTTLYVTLEPCVMCAGAMVHSRIGRVVFGARDAKTGAAGSLIDVLHHPGMNHRVEIIEGVLRDECATLLSDFFRMRRQEIKALKKADRAEGAGPAV

SEQ ID NO: 103 - protein, 164 aa, Shewanella putrefaciens
MDEYWMQVAMQMAEKAEAAGEVPVGAVLVKDGQQIATGYNLSISQHDPTAHAEILCLRSAGKKLENYRLLDATLYITLEPCAMCAGAMVHSRIARVVYGARDEKTGAAGTVVNLLQHPAFNHQVEVTSGVLAEACSAQLSRFFKRRRDEKKALKLAQRAQQGIE

SEQ ID NO: 104 - protein, 173 aa, Haemophilus influenzae
MDAAKVRSEFDEKMMRYALELADKAEALGEIPVGAVLVDDARNIIGEGWNLSIVQSDPTAHAEIIALRNGAKNIQNYRLLNSTLYVTLEPCTMCAGAILHSRIKRLVFGASDYKTGAIGSRFHFFDDYKMNHTLEITSGVLAEECSQKLSTFFQKRREEKKIEKALLKSLSDK

SEQ ID NO: 105 - protein, 161 aa, unidentified
  source 1..161: note = Caulobacter crescentus
MRTDESEDQDHRMMRLALDAARAAAEAGETPVGAVILDPSTGEVIATAGNGPIAAHDPTAHAEIAAMRAAAAKLGNYRLTDLTLVVTLEPCAMCAGAISHARIGRVVFGADDPKGGAVVHGPKFFAQPTCHWRPEVTGGVLADESADLLRGFFRARRKAKI

SEQ ID NO: 106 - protein, 179 aa, Geobacter sulfurreducens
MSSLKKTPIRDDAYWMGKAIREAAKAAARDEVPIGAVIVRDGAVIGRGHNLREGSNDPSAHAEMIAIRQAARRSANWRLTGATLYVTLEPCLMCMGAIILARLERVVFGCYDPKGGAAGSLYDLSADPRLNHQVRLSPGVCQEECGTMLSDFFRDLRRRKKAKATPALFIDERKVPPEP

SEQ ID NO: 107 - protein, 171 aa, Streptococcus pyogenes
MPYSLEEQTYFMQEALKEAEKSLQKAEIPIGCVIVKDGEIIGRGHNAREESNQAIMHAEIMAINEANAHEGNWRLLDTTLFVTIEPCVMCSGAIGLARIPHVIYGASNQKFGGADSLYQILTDERLNHRVQVERGLLAADCANIMQTFFRQGRERKKIAKHLIKEQSDPFD

SEQ ID NO: 108 - protein, 166 aa, synthetic construct; identical to SEQ ID NO: 99

SEQ ID NO: 109 - protein, 166 aa, synthetic construct
SEVEFSHEYWMRHALTLAKRARDEREVPVGAVLVLNNRVIGEGWNRAIGLHDPTAHAEIMALRQGGLVMQNYRLIDATLYVTFEPCVMCAGAMIHSRIGRVVFGWRNAKTGAAGSLMDVLHYPGMNHRVEITEGILADECAALLCYFFRMPRQVFNAQKKAQSSTD

SEQ ID NO: 110 - protein, 166 aa, synthetic construct
SEVEFSHEYWMRHALTLAKRARDEREVPVGAVLVLNNRVIGEGWNRAIGLHDPTAHAEIMALRQGGLVMQNYRLIDATLYVTFEPCVMCAGAMIHSRIGRVVFGVRNSKRGAAGSLMNVLNYPGMNHRVEITEGILADECAALLCDFYRMPRQVFNAQKKAQSSIN

SEQ ID NO: 111 - protein, 166 aa, unidentified
  source 1..166: note = Aquifex aeolicus
SEVEFSHEYWMRHALTLAKRARDEREVPVGAVLVLNNRVIGEGWNRAIGLHDPTAHAEIMALRQGGLVMQNYRLIDATLYVTFEPCVMCAGAMIHSRIGRVVFGWRNSKRGAAGSLMNVLNYPGMNHRVEITEGILADECAALLCDFYRMPRQVFNAQKKAQSSIN

SEQ ID NO: 112 - protein, 151 aa, synthetic construct
MGKEYFLKVALREAKRAFEKGEVPVGAIIVKEGEIISKAHNSVEELKDPTAHAEMLAIKEACRRLNTKYLEGCELYVTLEPCIMCSYALVLSRIEKVIFSALDKKHGGVVSVFNILDEPTLNHRVKWEYYPLEEASELLSEFFKKLRNNII

SEQ ID NO: 113 - protein, 166 aa, synthetic construct
SEVEFSHEYWMRHALTLAKRARDEGEVPVGAVLVLNNRVIGEGWNRAIGLYDPTAHAEIMALRQGGLVMQNYRLIDATLYVTFEPCVMCAGAMIHSRIGRVVFGVRNSKRGAAGSLMNVLNYPGMDHRVEITEGILADECAALLCDFYRMPRQVFNAQKKAQSSIN

SEQ ID NO: 114 - protein, 166 aa, synthetic construct
SEVEFSHEYWMRHALTLAKRARDEGEVPVGAVLVLNNRVIGEGWNRAIGLHDPTAHAEIMALRQGGLVMQNYRLIDATLYVTFEPCVMCAGAMIHSRIGRVVFGVRNSKRGAAGSLMNVLNYPGMDHRVEITEGILADECAALLCDFYRMPRQVFNAQKKAQSSIN

SEQ ID NO: 115 - protein, 166 aa, synthetic construct
SEVEFSHEYWMRHALTLAKRARDEREVPVGAVLVLNNRVIGEGWNRAIGLHDPTAHAEIMALRQGGLVMQNYGLIDATLYVTFEPCVMCAGAIIHSRIGRVVFGVRNSKRGAAGSLMNVLNYPGMNHRVEITEGILADECAALLCDFYRMPRQVFNAQKKAQSSIN

SEQ ID NO: 116 - protein, 166 aa, synthetic construct
SEVEFSHEYWMRHALTLAKRARDEREVPVGAVLVLNNRVIGEGWNRAIGLHDPTAHAEIMALRQGGLVMQNYRLIDATLYVTFEPCVMCAGAMIHSRIGRVVFGVRNSKRGAAGSLMNVLNYPGMDHRVEITEGILADECAALLCDFYRMPRQVFNAQKKAQSSIN

SEQ ID NO: 117 - protein, 166 aa, synthetic construct
SEVEFSHEYWMRHALTLAKRARDEGEVPVGAVLVLNNRVIGEGWNRAIGLYDPTAHAEIMALRQGGLVMQNYGLIDATLYVTFEPCVMCAGAMIHSRIGRVVFGVRNSKRGAAGSLMNVLNYPGMDHRVEITEGILADECAALLCDFYRMPRQVFNAQKKAQSSIN

SEQ ID NO: 118 - protein, 166 aa, synthetic construct
SEVEFSHEYWMRHALTLAKRARDEGEVPVGAVLVLNNRVIGEGWNRAIGLYDPTAHAEIMALRQGGLVMQNYGLIDATLYSTFEPCVMCAGAMIHSRIGRVVFGVRNSKRGAAGSLMNVLNYPGMDHRVEITEGILADECAALLCDFYRMPRRVFNAQKKAQSSIN

SEQ ID NO: 119 - protein, 150 aa, synthetic construct
  VARIANT 6..150: note = up to 29 copies of GGGGS may be absent
GGGGSGGGGSGGGGSGGGGSGGGGSGGGGSGGGGSGGGGSGGGGSGGGGSGGGGSGGGGSGGGGSGGGGSGGGGSGGGGSGGGGSGGGGSGGGGSGGGGSGGGGSGGGGSGGGGSGGGGSGGGGSGGGGSGGGGSGGGGSGGGGSGGGGS

SEQ ID NO: 120 - protein, 30 aa, synthetic construct
  VARIANT 2..30: note = up to 29 copies of G may be absent
GGGGGGGGGGGGGGGGGGGGGGGGGGGGGG

SEQ ID NO: 121 - protein, 150 aa, synthetic construct
  VARIANT 6..150: note = up to 29 copies of EAAAK may be absent
EAAAKEAAAKEAAAKEAAAKEAAAKEAAAKEAAAKEAAAKEAAAKEAAAKEAAAKEAAAKEAAAKEAAAKEAAAKEAAAKEAAAKEAAAKEAAAKEAAAKEAAAKEAAAKEAAAKEAAAKEAAAKEAAAKEAAAKEAAAKEAAAKEAAAK

SEQ ID NO: 122 - protein, 90 aa, synthetic construct
  VARIANT 4..90: note = up 29 copies of GGS may be absent
GGSGGSGGSGGSGGSGGSGGSGGSGGSGGSGGSGGSGGSGGSGGSGGSGGSGGSGGSGGSGGSGGSGGSGGSGGSGGSGGSGGSGGSGGS

SEQ ID NO: 123 - protein, 120 aa, synthetic construct
  VARIANT 5..120: note = up to 29 copies of SGGS may be absent
SGGSSGGSSGGSSGGSSGGSSGGSSGGSSGGSSGGSSGGSSGGSSGGSSGGSSGGSSGGSSGGSSGGSSGGSSGGSSGGSSGGSSGGSSGGSSGGSSGGSSGGSSGGSSGGSSGGSSGGS

SEQ ID NO: 124 - protein, 60 aa, synthetic construct
  VARIANT 2..60: note = up to 29 copies of XP may be absent
XPXPXPXPXPXPXPXPXPXPXPXPXPXPXPXPXPXPXPXPXPXPXPXPXPXPXPXPXPXP

SEQ ID NO: 125 - protein, 21 aa, synthetic construct
  VARIANT 4..21: note = up to 6 copies of GGS may be absent
GGSGGSGGSGGSGGSGGSGGS

SEQ ID NO: 126 - protein, 16 aa, synthetic construct
SGSETPGTSESATPES

SEQ ID NO: 127 - protein, 32 aa, synthetic construct
SGGSSGGSSGSETPGTSESATPESSGGSSGGS

SEQ ID NO: 128 - protein, 10 aa, synthetic construct
SGGSGGSGGS

SEQ ID NO: 129 - protein, 4 aa, synthetic construct
SGGS

SEQ ID NO: 130 - protein, 7 aa, synthetic construct
PKKKRKV

SEQ ID NO: 131 - protein, 30 aa, synthetic construct
MDSLLMNRRKFLYQFKNVRWAKGRRETYLC

SEQ ID NO: 132 - protein, 18 aa, synthetic construct
KRTADGSEFESPKKKRKV

SEQ ID NO: 133 - protein, 17 aa, synthetic construct
KRTADGSEFEPKKKRKV

SEQ ID NO: 134 - protein, 19 aa, synthetic construct
NLSKRPAAIKKAGQAKKKK

SEQ ID NO: 135 - protein, 9 aa, synthetic construct
PAAKRVKLD

SEQ ID NO: 136 - protein, 11 aa, synthetic construct
RQRRNELKRSF

SEQ ID NO: 137 - protein, 38 aa, synthetic construct
NQSSNFGPMKGGNFGGRSSGPYGGGGQYFAKPRNQGGY

SEQ ID NO: 138 - protein, 7 aa, synthetic construct
PKKKRKV

SEQ ID NO: 139 - protein, 16 aa, synthetic construct
KRXXXXXXXXXXKKKL

SEQ ID NO: 140 - protein, 410 aa, Homo sapiens
MEAENAGSYSLQQAQAFYTFPFQQLMAEAPNMAVVNEQQMPEEVPAPAPAQEPVQEAPKGRKRKPRTTEPKQPVEPKKPVESKKSGKSAKSKEKQEKITDTFKVKRKVDRFNGVSEAELLTKTLPDILTFNLDIVIIGINPGLMAAYKGHHYPGPGNHFWKCLFMSGLSEVQLNHMDDHTLPGKYGIGFTNMVERTTPGSKDLSSKEFREGGRILVQKLQKYQPRIAVFNGKCIYEIFSKEVFGVKVKNLEFGLQPHKIPDTETLCYVMPSSSARCAQFPRAQDKVHYYIKLKDLRDQLKGIERNMDVQEVQYTFDLQLAQEDAKKMAVKEEKYDPGYEAAYGGAYGENPCSSEPCGFSSNGLIESVELRGESAFSGIPNGQWMTQSFTDQIPSFSNHCGTQEQEEESHA

SEQ ID NO: 141 - protein, 168 aa, Escherichia coli
MVEDILAPGLRVVFCGINPGLSSAGTGFPFAHPANRFWKVIYQAGFTDRQLKPQEAQHLLDYRCGVTKLVDRPTVQANEVSKQELHAGGRKLIEKIEDYQPQALAILGKQAYEQGFSQRGAQWGKQTLTIGSTQIWVLPNPSGLSRVSLEKLVEAYRELDQALVVRGR

SEQ ID NO: 142 - protein, 410 aa, Homo sapiens
MEAENAGSYSLQQAQAFYTFPFQQLMAEAPNMAVVNEQQMPEEVPAPAPAQEPVQEAPKGRKRKPRTTEPKQPVEPKKPVESKKSGKSAKSKEKQEKITDTFKVKRKVDRFNGVSEAELLTKTLPDILTFNLDIVIIGIAPGLMAAYKGHHYPGPGNHFWKCLFMSGLSEVQLNHMDDHTLPGKYGIGFTNMVERTTPGSKDLSSKEFREGGRILVQKLQKYQPRIAVFNGKCIYEIFSKEVFGVKVKNLEFGLQPHKIPDTETLCYVMPSSSARCAQFPRAQDKVHYYIKLKDLRDQLKGIERNMDVQEVQYTFDLQLAQEDAKKMAVKEEKYDPGYEAAYGGAYGENPCSSEPCGFSSNGLIESVELRGESAFSGIPNGQWMTQSFTDQIPSFSNHCGTQEQEEESHA

SEQ ID NO: 143 - protein, 167 aa, Escherichia coli
MVEDILAPGLRVVFCGIAPGLSSAGTGFPFAHPANRFWKVIYQAGFTDRQLKPQEAQHLLDYRCGVTKLVDRPTVQANEVSKQELHAGGRKLIEKIEDYQPQALAILGKQAYEQGFSQRGAQWGKQTLTIGSTQIWVLPNPSGLSRVSLEKLVEAYRELDQALVVRG

SEQ ID NO: 144 - DNA, 23 bp, synthetic construct
  source 1..23: mol_type = other DNA
  variation 21: note = n can be anything
mmmmmmmmnnnnnnnnnnnnngg

SEQ ID NO: 145 - skipped

SEQ ID NO: 146 - DNA, 23 bp, synthetic construct
  source 1..23: mol_type = other DNA
  variation 21: note = n can be anything
mmmmmmmmmnnnnnnnnnnnngg

SEQ ID NO: 147 - skipped

SEQ ID NO: 148 - DNA, 27 bp, synthetic construct
  source 1..27: mol_type = other DNA
  variation 21..22: note = n can be anything
mmmmmmmmnnnnnnnnnnnnnnagaaw

SEQ ID NO: 149 - skipped

SEQ ID NO: 150 - DNA, 27 bp, synthetic construct
  source 1..27: mol_type = other DNA
  variation 21..22: note = n can be anything
mmmmmmmmmnnnnnnnnnnnnnagaaw

SEQ ID NO: 151 - skipped

SEQ ID NO: 152 - DNA, 25 bp, synthetic construct
  source 1..25: mol_type = other DNA
  variation 21: note = n can by anything
  variation 24: note = n can be anything
mmmmmmmmnnnnnnnnnnnnnggng

SEQ ID NO: 153 - skipped

SEQ ID NO: 154 - DNA, 25 bp, synthetic construct
  source 1..25: mol_type = other DNA
  variation 21: note = n can be anything
  variation 24: note = n can be anything
mmmmmmmmmnnnnnnnnnnnnggng

SEQ ID NO: 155 - skipped

SEQ ID NO: 156 - DNA, 125 bp, synthetic construct
  source 1..125: mol_type = other DNA
nnnnnnnngtttttgtactctcaagatttagaaataaatcttgcagaagctacaaagataaggcttcatgccgaaatcaacaccctgtcattttatggcagggtgttttcgttatttaatttttt

SEQ ID NO: 157 - DNA, 121 bp, synthetic construct
  source 1..121: mol_type = other DNA
nnnnnnnnnnnnnnnnnngtttttgtactctcagaaatgcagaagctacaaagataaggcttcatgccgaaatcaacaccctgtcattttatggcagggtgttttcgttatttaatttttt

SEQ ID NO: 158 - DNA, 109 bp, synthetic construct
  source 1..109: mol_type = other DNA
nnnnnnnnnnnnnnnnnnnngtttttgtactctcagaaatgcagaagctacaaagataaggcttcatgccgaaatcaacaccctgtcattttatggcagggtgtttttt

SEQ ID NO: 159 - DNA, 102 bp, synthetic construct
  source 1..102: mol_type = other DNA
nnnnnnnnnnnnnnnnnnnngttttagagctagaaatagcaagttaaaataaggctagtccgttatcaacttgaaaaagtggcaccgagtcggtgctttttt

SEQ ID NO: 160 - DNA, 88 bp, synthetic construct
  source 1..88: mol_type = other DNA
nnnnnnnnnnnnnnnnnnnngttttagagctagaaatagcaagttaaaataaggctagtccgttatcaacttgaaaaagtgttttttt

SEQ ID NO: 161 - DNA, 76 bp, synthetic construct
  source 1..76: mol_type = other DNA
nnnnnnnnnnnnnnnnnnnngttttagagctagaaatagcaagttaaaataaggctagtccgttatcatttttttt

SEQ ID NO: 162 - RNA, 81 nt, synthetic construct
  source 1..81: mol_type = other RNA
gttttagagctagaaatagcaagttaaaataaggctagtccgttatcaacttgaaaaagtggcaccgagtcggtgcttttt

SEQ ID NO: 163 - protein, 10 aa, synthetic construct
TSTLLMENSS

SEQ ID NO: 164 - protein, 11 aa, synthetic construct
PRSSLYPALTP

SEQ ID NO: 165 - protein, 8 aa, synthetic construct
VQALVLTQ

SEQ ID NO: 166 - protein, 12 aa, synthetic construct
PLQVLTLNIERR

SEQ ID NO: 167 - DNA, 72 bp, Homo sapiens
  source 1..72: mol_type = genomic DNA
gggggtatagctcagtggtagagcgcgtgcttagcatgcacgaggtcctgggttcgatccccagtacctcca

SEQ ID NO: 168 - DNA, 73 bp, Homo sapiens
  source 1..73: mol_type = genomic DNA
ggggaattagctcaagtggtagagcgcttgcttagcacgcaagaggtagtgggatcgatgcccacattctcca

SEQ ID NO: 169 - DNA, 73 bp, Homo sapiens; identical to SEQ ID NO: 168
  source 1..73: mol_type = genomic DNA

SEQ ID NO: 170 - DNA, 73 bp, Homo sapiens
  source 1..73: mol_type = genomic DNA
ggggaattagctcaaatggtagagcgctcgcttagcatgcgagaggtagcgggatcgatgcccgcattctcca

SEQ ID NO: 171 - DNA, 73 bp, Homo sapiens
  source 1..73: mol_type = genomic DNA
ggggaattagctcaagtggtagagcgcttgcttagcatgcaagaggtagtgggatcgatgcccacattctcca

SEQ ID NO: 172 - DNA, 73 bp, Homo sapiens; identical to SEQ ID NO: 171
  source 1..73: mol_type = genomic DNA

SEQ ID NO: 173 - DNA, 73 bp, Homo sapiens; identical to SEQ ID NO: 171
  source 1..73: mol_type = genomic DNA

SEQ ID NO: 174 - DNA, 73 bp, Homo sapiens
  source 1..73: mol_type = genomic DNA
ggggaattagctcaagcggtagagcgcttgcttagcatgcaagaggtagtgggatcgatgcccacattctcca

SEQ ID NO: 175 - DNA, 73 bp, Homo sapiens; identical to SEQ ID NO: 174
  source 1..73: mol_type = genomic DNA

SEQ ID NO: 176 - DNA, 73 bp, Homo sapiens; identical to SEQ ID NO: 174
  source 1..73: mol_type = genomic DNA

SEQ ID NO: 177 - DNA, 73 bp, Homo sapiens
  source 1..73: mol_type = genomic DNA
ggggaattagctcaagtggtagagcgcttgcttagcatgcaagaggtagtgggatcaatgcccacattctcca

SEQ ID NO: 178 - DNA, 73 bp, Homo sapiens; identical to SEQ ID NO: 177
  source 1..73: mol_type = genomic DNA

SEQ ID NO: 179 - DNA, 73 bp, Homo sapiens
  source 1..73: mol_type = genomic DNA
ggggaattagctcaagtggtagagcgctcgcttagcatgcgagaggtagtgggatcgatgcccgcattctcca

SEQ ID NO: 180 - DNA, 73 bp, Homo sapiens
  source 1..73: mol_type = genomic DNA
ggggaattagcccaagtggtagagcgcttgcttagcatgcaagaggtagtgggatcgatgcccacattctcca

SEQ ID NO: 181 - DNA, 72 bp, Homo sapiens
  source 1..72: mol_type = genomic DNA
gggggtgtagctcagtggtagagcgcgtgcttagcatgcacgaggccccgggttcaatccccggcacctcca

SEQ ID NO: 182 - DNA, 72 bp, Homo sapiens; identical to SEQ ID NO: 181
  source 1..72: mol_type = genomic DNA

SEQ ID NO: 183 - DNA, 73 bp, Homo sapiens
  source 1..73: mol_type = genomic DNA
ggggaattagctcaagcggtagagcgcttgcttagcatgcaagaggtagcaggatcgatgcctgcattctcca

SEQ ID NO: 184 - DNA, 72 bp, Homo sapiens
  source 1..72: mol_type = genomic DNA
gggggtgtagctcagtggtagagcgcgtgcttagcatgtacgaggtcccgggttcaatccccggcacctcca

SEQ ID NO: 185 - DNA, 72 bp, Homo sapiens
  source 1..72: mol_type = genomic DNA
ggggatgtagctcagtggtagagcgcatgcttagcatgcatgaggtcccgggttcgatccccagcatctcca

SEQ ID NO: 186 - DNA, 72 bp, Homo sapiens
  source 1..72: mol_type = genomic DNA
gggggtgtagctcagtggtagagcgcgtgcttagcatgcacgaggccctgggttcaatccccagcacctcca

SEQ ID NO: 187 - DNA, 72 bp, Homo sapiens
  source 1..72: mol_type = genomic DNA
gggggtatagctcagcggtagagcgcgtgcttagcatgcacgaggtcctgggttcaatccccaatacctcca

SEQ ID NO: 188 - DNA, 72 bp, Homo sapiens; identical to SEQ ID NO: 181
  source 1..72: mol_type = genomic DNA

SEQ ID NO: 189 - DNA, 73 bp, Homo sapiens
  source 1..73: mol_type = genomic DNA
gggggattagctcaaatggtagagcgctcgcttagcatgcgagaggtagcgggatcgatgcccgcatcctcca

SEQ ID NO: 190 - DNA, 73 bp, Homo sapiens; identical to SEQ ID NO: 189
  source 1..73: mol_type = genomic DNA

SEQ ID NO: 191 - DNA, 73 bp, Homo sapiens
  source 1..73: mol_type = genomic DNA
ggggaattagctcaggcggtagagcgctcgcttagcatgcgagaggtagcgggatcgacgcccgcattctcca

SEQ ID NO: 192 - DNA, 73 bp, Homo sapiens; identical to SEQ ID NO: 191
  source 1..73: mol_type = genomic DNA

SEQ ID NO: 193 - DNA, 72 bp, Homo sapiens
  source 1..72: mol_type = genomic DNA
ggggatgtagctcagtggtagagcgcatgcttcgcatgtatgaggtcccgggttcgatccccggcatctcca

SEQ ID NO: 194 - DNA, 72 bp, Homo sapiens
  source 1..72: mol_type = genomic DNA
ggggatgtagctcagtggtagagcgcatgcttcgcatgtatgaggccccgggttcgatccccggcatctcca

SEQ ID NO: 195 - DNA, 72 bp, Homo sapiens
  source 1..72: mol_type = genomic DNA
ggggatgtagctcagtggtagagcgcgcgcttcgcatgtgtgaggtcccgggttcaatccccggcatctcca

SEQ ID NO: 196 - DNA, 72 bp, Homo sapiens
  source 1..72: mol_type = genomic DNA
gggggtgtagctcagtggtagagcgcgtgcttcgcatgtacgaggccccgggttcgacccccggctcctcca

SEQ ID NO: 197 - DNA, 72 bp, Homo sapiens
  source 1..72: mol_type = genomic DNA
gggggtgtagctcagtggtagagcgcatgctttgcatgtatgaggtcccgggttcgatccccggcacctcca

SEQ ID NO: 198 - DNA, 72 bp, Homo sapiens
  source 1..72: mol_type = genomic DNA
ggggatgtagctcagtggtagagcgcatgctttgcatgtatgaggtcccgggttcgatccccggcatctcca

SEQ ID NO: 199 - DNA, 72 bp, Homo sapiens
  source 1..72: mol_type = genomic DNA
ggggatgtagctcagtggtagagcgcatgctttgcatgtatgaggccccgggttcgatccccggcatctcca

SEQ ID NO: 200 - DNA, 72 bp, Homo sapiens; identical to SEQ ID NO: 199
  source 1..72: mol_type = genomic DNA

SEQ ID NO: 201 - DNA, 72 bp, Homo sapiens
  source 1..72: mol_type = genomic DNA
ggggatgtagctcagtggtagagcgcatgctttgcacgtatgaggccccgggttcaatccccggcatctcca

SEQ ID NO: 202 - DNA, 72 bp, Homo sapiens
  source 1..72: mol_type = genomic DNA
gggggtgtagctcagtggtagagcgcatgctttgcatgtatgaggcctcgggttcgatccccgacacctcca

SEQ ID NO: 203 - DNA, 72 bp, Homo sapiens
  source 1..72: mol_type = genomic DNA
gggggtgtagctcagtggtagagcacatgctttgcatgtgtgaggccccgggttcgatccccggcacctcca

SEQ ID NO: 204 - DNA, 71 bp, Homo sapiens
  source 1..71: mol_type = genomic DNA
gggggtgtagctcagtggtagagcgcatgctttgcatgtatgaggcctcggttcgatccccgacacctcca

SEQ ID NO: 205 - DNA, 73 bp, Homo sapiens
  source 1..73: mol_type = genomic DNA
gggccagtggcgcaatggataacgcgtctgactacggatcagaagattccaggttcgactcctggctggctcg

SEQ ID NO: 206 - DNA, 73 bp, Homo sapiens; identical to SEQ ID NO: 205
  source 1..73: mol_type = genomic DNA

SEQ ID NO: 207 - DNA, 73 bp, Homo sapiens; identical to SEQ ID NO: 205
  source 1..73: mol_type = genomic DNA

SEQ ID NO: 208 - DNA, 73 bp, Homo sapiens
  source 1..73: mol_type = genomic DNA
gggccagtggcgcaatggataacgcgtctgactacggatcagaagattctaggttcgactcctggctggctcg

SEQ ID NO: 209 - DNA, 73 bp, Homo sapiens; identical to SEQ ID NO: 208
  source 1..73: mol_type = genomic DNA

SEQ ID NO: 210 - DNA, 73 bp, Homo sapiens; identical to SEQ ID NO: 208
  source 1..73: mol_type = genomic DNA

SEQ ID NO: 211 - DNA, 73 bp, Homo sapiens; identical to SEQ ID NO: 208
  source 1..73: mol_type = genomic DNA

SEQ ID NO: 212 - DNA, 73 bp, Homo sapiens
  source 1..73: mol_type = genomic DNA
ggccgcgtggcctaatggataaggcgtctgattccggatcagaagattgagggttcgagtcccttcgtggtcg

SEQ ID NO: 213 - DNA, 73 bp, Homo sapiens; identical to SEQ ID NO: 212
  source 1..73: mol_type = genomic DNA

SEQ ID NO: 214 - DNA, 73 bp, Homo sapiens; identical to SEQ ID NO: 212
  source 1..73: mol_type = genomic DNA

SEQ ID NO: 215 - DNA, 73 bp, Homo sapiens
  source 1..73: mol_type = genomic DNA
gacccagtggcctaatggataaggcatcagcctccggagctggggattgtgggttcgagtcccatctgggtcg

SEQ ID NO: 216 - DNA, 73 bp, Homo sapiens
  source 1..73: mol_type = genomic DNA
gccccagtggcctaatggataaggcactggcctcctaagccagggattgtgggttcgagtcccacctggggta

SEQ ID NO: 217 - DNA, 73 bp, Homo sapiens
  source 1..73: mol_type = genomic DNA
gccccagtggcctaatggataaggcactggcctcctaagccagggattgtgggttcgagtcccacctggggtg

SEQ ID NO: 218 - DNA, 73 bp, Homo sapiens
  source 1..73: mol_type = genomic DNA
gccccggtggcctaatggataaggcattggcctcctaagccagggattgtgggttcgagtcccacccggggta

SEQ ID NO: 219 - DNA, 73 bp, Homo sapiens
  source 1..73: mol_type = genomic DNA
gccccagtggcctaatggataaggcattggcctcctaagccagggattgtgggttcgagtcccatctggggtg

SEQ ID NO: 220 - DNA, 73 bp, Homo sapiens
  source 1..73: mol_type = genomic DNA
gccccagtggcctgatggataaggtactggcctcctaagccagggattgtgggttcgagttccacctggggta

SEQ ID NO: 221 - DNA, 73 bp, Homo sapiens
  source 1..73: mol_type = genomic DNA
ggccgcgtggcctaatggataaggcgtctgacttcggatcagaagattgcaggttcgagtcctgccgcggtcg

SEQ ID NO: 222 - DNA, 73 bp, Homo sapiens
  source 1..73: mol_type = genomic DNA
gaccacgtggcctaatggataaggcgtctgacttcggatcagaagattgagggttcgaatccctccgtggtta

SEQ ID NO: 223 - DNA, 73 bp, Homo sapiens
  source 1..73: mol_type = genomic DNA
gaccgcgtggcctaatggataaggcgtctgacttcggatcagaagattgagggttcgagtcccttcgtggtcg

SEQ ID NO: 224 - DNA, 73 bp, Homo sapiens
  source 1..73: mol_type = genomic DNA
gaccacgtggcctaatggataaggcgtctgacttcggatcagaagattgagggttcgaatcccttcgtggtta

SEQ ID NO: 225 - DNA, 73 bp, Homo sapiens
  source 1..73: mol_type = genomic DNA
gaccacgtggcctaatggataaggcgtctgacttcggatcagaagattgagggttcgaatcccttcgtggttg

SEQ ID NO: 226 - DNA, 73 bp, Homo sapiens
  source 1..73: mol_type = genomic DNA
ggccgtgtggcctaatggataaggcgtctgacttcggatcaaaagattgcaggtttgagttctgccacggtcg

SEQ ID NO: 227 - DNA, 85 bp, Homo sapiens
  source 1..85: mol_type = genomic DNA
ggctccgtggcgcaatggatagcgcattggacttctagaggctgaaggcattcaaaggttccgggttcgagtcccggcggagtcg

SEQ ID NO: 228 - DNA, 88 bp, Homo sapiens
  source 1..88: mol_type = genomic DNA
ggctctgtggcgcaatggatagcgcattggacttctagtgacgaatagagcaattcaaaggttgtgggttcgaatcccaccagagtcg

SEQ ID NO: 229 - DNA, 91 bp, Homo sapiens
  source 1..91: mol_type = genomic DNA
ggctctgtggcgcaatggatagcgcattggacttctagctgagcctagtgtggtcattcaaaggttgtgggttcgagtcccaccagagtcg

SEQ ID NO: 230 - DNA, 86 bp, Homo sapiens
  source 1..86: mol_type = genomic DNA
ggctctgtggcgcaatggatagcgcattggacttctagatagttagagaaattcaaaggttgtgggttcgagtcccaccagagtcg

SEQ ID NO: 231 - DNA, 74 bp, Homo sapiens
  source 1..74: mol_type = genomic DNA
gtctctgtggcgcaatggacgagcgcgctggacttctaatccagaggttccgggttcgagtcccggcagagatg

SEQ ID NO: 232 - DNA, 87 bp, Homo sapiens
  source 1..87: mol_type = genomic DNA
ggctctgtggcgcaatggatagcgcattggacttctagcctaaatcaagagattcaaaggttgcgggttcgagtccctccagagtcg

SEQ ID NO: 233 - DNA, 74 bp, Homo sapiens
  source 1..74: mol_type = genomic DNA
gtctctgtggcgcaatcggttagcgcgttcggctgttaaccgaaaggttggtggttcgatcccacccagggacg

SEQ ID NO: 234 - DNA, 74 bp, Homo sapiens
  source 1..74: mol_type = genomic DNA
gtctctgtggcgcaatcggctagcgcgtttggctgttaactaaaaggttggcggttcgaacccacccagaggcg

SEQ ID NO: 235 - DNA, 74 bp, Homo sapiens
  source 1..74: mol_type = genomic DNA
gtctctgtggtgcaatcggttagcgcgttccgctgttaaccgaaagcttggtggttcgagcccacccagggatg

SEQ ID NO: 236 - DNA, 74 bp, Homo sapiens; identical to SEQ ID NO: 235
  source 1..74: mol_type = genomic DNA

SEQ ID NO: 237 - DNA, 74 bp, Homo sapiens
  source 1..74: mol_type = genomic DNA
gtctctgtggcgcaatcggctagcgcgtttggctgttaactaaaaagttggtggttcgaacacacccagaggcg

SEQ ID NO: 238 - DNA, 74 bp, Homo sapiens
  source 1..74: mol_type = genomic DNA
gtctctgtggcgcaatcggttagcgcgttcggctgttaaccgaaaggttggtggttcgagcccacccagggacg

SEQ ID NO: 239 - DNA, 74 bp, Homo sapiens; identical to SEQ ID NO: 238
  source 1..74: mol_type = genomic DNA

SEQ ID NO: 240 - DNA, 74 bp, Homo sapiens; identical to SEQ ID NO: 238
  source 1..74: mol_type = genomic DNA

SEQ ID NO: 241 - DNA, 74 bp, Homo sapiens; identical to SEQ ID NO: 238
  source 1..74: mol_type = genomic DNA

SEQ ID NO: 242 - DNA, 74 bp, Homo sapiens; identical to SEQ ID NO: 238
  source 1..74: mol_type = genomic DNA

SEQ ID NO: 243 - DNA, 74 bp, Homo sapiens; identical to SEQ ID NO: 238
  source 1..74: mol_type = genomic DNA

SEQ ID NO: 244 - DNA, 74 bp, Homo sapiens; identical to SEQ ID NO: 238
  source 1..74: mol_type = genomic DNA

SEQ ID NO: 245 - DNA, 74 bp, Homo sapiens; identical to SEQ ID NO: 238
  source 1..74: mol_type = genomic DNA

SEQ ID NO: 246 - DNA, 74 bp, Homo sapiens
  source 1..74: mol_type = genomic DNA
gtctctgtggcgcaatcggttagcgcgttcggctgttaaccgcaaggttggtggttccagcccacccagggacg

SEQ ID NO: 247 - DNA, 75 bp, Homo sapiens
  source 1..75: mol_type = genomic DNA
gtctctgtggcgcaattggttagcgcgttcggttgttaaccgtaaaggttggtggttcgagcccacccaggaacg

SEQ ID NO: 248 - DNA, 74 bp, Homo sapiens
  source 1..74: mol_type = genomic DNA
gtctctgtggcgcaatcggctagcgcttttggctgttaactaaaaggttggtggtttgaacccacccagaggcg

SEQ ID NO: 249 - DNA, 74 bp, Homo sapiens
  source 1..74: mol_type = genomic DNA
gtctctgtggcgcaatcggttagcgcattcggctgttaaccgaaaggttggtggttcgagcccacccagggacg

SEQ ID NO: 250 - DNA, 74 bp, Homo sapiens
  source 1..74: mol_type = genomic DNA
gtctctgtggcgcaatcggttagcgcgttcggctgttaaccgaaagattggtggttcgagcccacccagggacg

SEQ ID NO: 251 - DNA, 74 bp, Homo sapiens
  source 1..74: mol_type = genomic DNA
gtctctgtggcgcaatcggttagcgcgttcggctgttaactgaaaggttggtggttcgagcccacccagggacg

SEQ ID NO: 252 - DNA, 74 bp, Homo sapiens
  source 1..74: mol_type = genomic DNA
gtctctgtggcgcaatgggttagcgcgttcggctgttaaccgaaaggttggtggttcgagcccatccagggacg

SEQ ID NO: 253 - DNA, 74 bp, Homo sapiens
  source 1..74: mol_type = genomic DNA
gtctctgtggcgtagtcggttagcgcgttcggctgttaaccgaaaggttggtggttcgagcccacccaggaacg

SEQ ID NO: 254 - DNA, 74 bp, Homo sapiens
  source 1..74: mol_type = genomic DNA
gtctctgtggcgcaatcggctagcgcgtttggctgttaactaaaaggttggtggttcgaacccacccagaggcg

SEQ ID NO: 255 - DNA, 74 bp, Homo sapiens
  source 1..74: mol_type = genomic DNA
gtctctgtggcgcaatcggttagcgcgttcggctgttaactgaaaggttggtggttcgagcccacccggggacg

SEQ ID NO: 256 - DNA, 74 bp, Homo sapiens
  source 1..74: mol_type = genomic DNA
gtctctgtggcgcaatcggttagcgcgttcggctgttaactgaaaggttagtggttcgagcccacccggggacg

SEQ ID NO: 257 - DNA, 72 bp, Homo sapiens
  source 1..72: mol_type = genomic DNA
tcctcgttagtatagtggttagtatccccgcctgtcacgcgggagaccggggttcaattccccgacggggag

SEQ ID NO: 258 - DNA, 72 bp, Homo sapiens
  source 1..72: mol_type = genomic DNA
tcctcgttagtatagtggtgagtatccccgcctgtcacgcgggagaccggggttcgattccccgacggggag

SEQ ID NO: 259 - DNA, 72 bp, Homo sapiens; identical to SEQ ID NO: 258
  source 1..72: mol_type = genomic DNA

SEQ ID NO: 260 - DNA, 72 bp, Homo sapiens; identical to SEQ ID NO: 258
  source 1..72: mol_type = genomic DNA

SEQ ID NO: 261 - DNA, 72 bp, Homo sapiens; identical to SEQ ID NO: 258
  source 1..72: mol_type = genomic DNA

SEQ ID NO: 262 - DNA, 72 bp, Homo sapiens; identical to SEQ ID NO: 258
  source 1..72: mol_type = genomic DNA

SEQ ID NO: 263 - DNA, 72 bp, Homo sapiens; identical to SEQ ID NO: 258
  source 1..72: mol_type = genomic DNA

SEQ ID NO: 264 - DNA, 72 bp, Homo sapiens; identical to SEQ ID NO: 258
  source 1..72: mol_type = genomic DNA

SEQ ID NO: 265 - DNA, 72 bp, Homo sapiens; identical to SEQ ID NO: 258
  source 1..72: mol_type = genomic DNA

SEQ ID NO: 266 - DNA, 72 bp, Homo sapiens; identical to SEQ ID NO: 258
  source 1..72: mol_type = genomic DNA

SEQ ID NO: 267 - DNA, 72 bp, Homo sapiens; identical to SEQ ID NO: 258
  source 1..72: mol_type = genomic DNA

SEQ ID NO: 268 - DNA, 72 bp, Homo sapiens; identical to SEQ ID NO: 258
  source 1..72: mol_type = genomic DNA

SEQ ID NO: 269 - DNA, 72 bp, Homo sapiens
  source 1..72: mol_type = genomic DNA
tcctcgttagtatagtggtgagtgtccccgtctgtcacgcgggagaccggggttcgattccccgacggggag

SEQ ID NO: 270 - DNA, 72 bp, Homo sapiens
  source 1..72: mol_type = genomic DNA
gggggcatagctcagtggtagagcatttgactgcagatcaagaggtccctggttcaaatccaggtgccccct

SEQ ID NO: 271 - DNA, 72 bp, Homo sapiens
  source 1..72: mol_type = genomic DNA
gggggtatagctcaggggtagagcatttgactgcagatcaagaggtccctggttcaaatccaggtgcccccc

SEQ ID NO: 272 - DNA, 72 bp, Homo sapiens
  source 1..72: mol_type = genomic DNA
gggggtatagcttagcggtagagcatttgactgcagatcaagaggtccccggttcaaatccgggtgccccct

SEQ ID NO: 273 - DNA, 72 bp, Homo sapiens
  source 1..72: mol_type = genomic DNA
gggggtatagcttaggggtagagcatttgactgcagatcaaaaggtccctggttcaaatccaggtgcccctt

SEQ ID NO: 274 - DNA, 72 bp, Homo sapiens
  source 1..72: mol_type = genomic DNA
gggggtatagctcaggggtagagcatttgactgcagatcaagaggtccccagttcaaatctgggtgccccct

SEQ ID NO: 275 - DNA, 72 bp, Homo sapiens
  source 1..72: mol_type = genomic DNA
gggggtatagctcaggggtagagcatttgactgcagatcaagaagtccccggttcaaatccgggtgccccct

SEQ ID NO: 276 - DNA, 72 bp, Homo sapiens
  source 1..72: mol_type = genomic DNA
gggggtatagctcaggggtagagcatttgactgcagatcaagaggtctctggttcaaatccaggtgccccct

SEQ ID NO: 277 - DNA, 72 bp, Homo sapiens
  source 1..72: mol_type = genomic DNA
gggggtatagctcaggggtagagcacttgactgcagatcaagaagtccttggttcaaatccaggtgccccct

SEQ ID NO: 278 - DNA, 72 bp, Homo sapiens
  source 1..72: mol_type = genomic DNA
ggggatatagctcaggggtagagcatttgactgcagatcaagaggtccccggttcaaatccgggtgcccccc

SEQ ID NO: 279 - DNA, 72 bp, Homo sapiens
  source 1..72: mol_type = genomic DNA
gggggtatagttcaggggtagagcatttgactgcagatcaagaggtccctggttcaaatccaggtgccccct

SEQ ID NO: 280 - DNA, 72 bp, Homo sapiens
  source 1..72: mol_type = genomic DNA
gggggtatagctcaggggtagagcatttgactgcaaatcaagaggtccctgattcaaatccaggtgccccct

SEQ ID NO: 281 - DNA, 72 bp, Homo sapiens
  source 1..72: mol_type = genomic DNA
gggggtatagctcagtggtagagcatttgactgcagatcaagaggtccccggttcaaatccgggtgccccct

SEQ ID NO: 282 - DNA, 72 bp, Homo sapiens; identical to SEQ ID NO: 281
  source 1..72: mol_type = genomic DNA

SEQ ID NO: 283 - DNA, 72 bp, Homo sapiens; identical to SEQ ID NO: 281
  source 1..72: mol_type = genomic DNA

SEQ ID NO: 284 - DNA, 72 bp, Homo sapiens; identical to SEQ ID NO: 281
  source 1..72: mol_type = genomic DNA

SEQ ID NO: 285 - DNA, 72 bp, Homo sapiens
  source 1..72: mol_type = genomic DNA
gggcgtatagctcaggggtagagcatttgactgcagatcaagaggtccccagttcaaatctgggtgccccct

SEQ ID NO: 286 - DNA, 72 bp, Homo sapiens
  source 1..72: mol_type = genomic DNA
gggggtatagctcacaggtagagcatttgactgcagatcaagaggtccccggttcaaatctgggtgccccct

SEQ ID NO: 287 - DNA, 70 bp, Homo sapiens
  source 1..70: mol_type = genomic DNA
gggcgtatagctcaggggtagagcatttgactgcagatcaagaggtccccagttcaaatctgggtgccca

SEQ ID NO: 288 - DNA, 72 bp, Homo sapiens
  source 1..72: mol_type = genomic DNA
gggggtatagctcacaggtagagcatttgactgcagatcaagaggtccccggttcaaatccggttactccct

SEQ ID NO: 289 - DNA, 72 bp, Homo sapiens
  source 1..72: mol_type = genomic DNA
gggggtatagctcaggggtagagcacttgactgcagatcaagaggtccctggttcaaatccaggtgccccct

SEQ ID NO: 290 - DNA, 72 bp, Homo sapiens
  source 1..72: mol_type = genomic DNA
gggggtatagctcagtggtagagcatttgactgcagatcaagaggtccctggttcaaatccgggtgccccct

SEQ ID NO: 291 - DNA, 73 bp, Homo sapiens
  source 1..73: mol_type = genomic DNA
gggggtatagctcagtgggtagagcatttgactgcagatcaagaggtccccggttcaaatccgggtgccccct

SEQ ID NO: 292 - DNA, 72 bp, Homo sapiens
  source 1..72: mol_type = genomic DNA
gggggtgtagctcagtggtagagcatttgactgcagatcaagaggtccctggttcaaatccaggtgccccct

SEQ ID NO: 293 - DNA, 73 bp, Homo sapiens
  source 1..73: mol_type = genomic DNA
gggggtatagctcaggtggtagagcatttgactgcagatcaagaggtccccggttcaaatccgggtgccccct

SEQ ID NO: 294 - DNA, 72 bp, Homo sapiens
  source 1..72: mol_type = genomic DNA
gggggtatagctcaggggtagagcatttgactgcagatcaagaggtccccggttcaaatccgggtgccccct

SEQ ID NO: 295 - DNA, 72 bp, Homo sapiens
  source 1..72: mol_type = genomic DNA
gggggtatagctcaggggtagagcatttgactgcagatcaagaggtccctggttcaaatccaggtgccccct

SEQ ID NO: 296 - DNA, 72 bp, Homo sapiens; identical to SEQ ID NO: 295
  source 1..72: mol_type = genomic DNA

SEQ ID NO: 297 - DNA, 72 bp, Homo sapiens; identical to SEQ ID NO: 295
  source 1..72: mol_type = genomic DNA

SEQ ID NO: 298 - DNA, 72 bp, Homo sapiens; identical to SEQ ID NO: 295
  source 1..72: mol_type = genomic DNA

SEQ ID NO: 299 - DNA, 72 bp, Homo sapiens
  source 1..72: mol_type = genomic DNA
ggttccatggtgtaatggttagcactctggactctgaatccagcgatccgagttcaaatctcggtggaacct

SEQ ID NO: 300 - DNA, 72 bp, Homo sapiens; identical to SEQ ID NO: 299
  source 1..72: mol_type = genomic DNA

SEQ ID NO: 301 - DNA, 72 bp, Homo sapiens; identical to SEQ ID NO: 299
  source 1..72: mol_type = genomic DNA

SEQ ID NO: 302 - DNA, 72 bp, Homo sapiens; identical to SEQ ID NO: 299
  source 1..72: mol_type = genomic DNA

SEQ ID NO: 303 - DNA, 72 bp, Homo sapiens; identical to SEQ ID NO: 299
  source 1..72: mol_type = genomic DNA

SEQ ID NO: 304 - DNA, 72 bp, Homo sapiens
  source 1..72: mol_type = genomic DNA
ggttccatggtgtaatggttagcactctggactctgaatccagcgatccgagttcaagtctcggtggaacct

SEQ ID NO: 305 - DNA, 72 bp, Homo sapiens
  source 1..72: mol_type = genomic DNA
ggttccatggtgtaatggtgagcactctggactctgaatccagcgatccgagttcgagtctcggtggaacct

SEQ ID NO: 306 - DNA, 72 bp, Homo sapiens; identical to SEQ ID NO: 305
  source 1..72: mol_type = genomic DNA

SEQ ID NO: 307 - DNA, 72 bp, Homo sapiens
  source 1..72: mol_type = genomic DNA
ggttccatggtgtaatggtaagcactctggactctgaatccagcgatccgagttcgagtctcggtggaacct

SEQ ID NO: 308 - DNA, 72 bp, Homo sapiens; identical to SEQ ID NO: 307
  source 1..72: mol_type = genomic DNA

SEQ ID NO: 309 - DNA, 72 bp, Homo sapiens
  source 1..72: mol_type = genomic DNA
ggttccatggtgtaatggttagcactctggactctgaatccggtaatccgagttcaaatctcggtggaacct

SEQ ID NO: 310 - DNA, 72 bp, Homo sapiens
  source 1..72: mol_type = genomic DNA
ggccccatggtgtaatggtcagcactctggactctgaatccagcgatccgagttcaaatctcggtgggaccc

SEQ ID NO: 311 - DNA, 72 bp, Homo sapiens
  source 1..72: mol_type = genomic DNA
ggttccatggtgtaatggtaagcactctggactctgaatccagccatctgagttcgagtctctgtggaacct

SEQ ID NO: 312 - DNA, 72 bp, Homo sapiens
  source 1..72: mol_type = genomic DNA
ggtcccatggtgtaatggttagcactctggactttgaatccagcgatccgagttcaaatctcggtgggacct

SEQ ID NO: 313 - DNA, 72 bp, Homo sapiens
  source 1..72: mol_type = genomic DNA
ggtcccatggtgtaatggttagcactctggactttgaatccagcaatccgagttcgaatctcggtgggacct

SEQ ID NO: 314 - DNA, 72 bp, Homo sapiens
  source 1..72: mol_type = genomic DNA
ggccccatggtgtaatggttagcactctggactttgaatccagcgatccgagttcaaatctcggtgggacct

SEQ ID NO: 315 - DNA, 72 bp, Homo sapiens; identical to SEQ ID NO: 314
  source 1..72: mol_type = genomic DNA

SEQ ID NO: 316 - DNA, 72 bp, Homo sapiens; identical to SEQ ID NO: 314
  source 1..72: mol_type = genomic DNA

SEQ ID NO: 317 - DNA, 72 bp, Homo sapiens
  source 1..72: mol_type = genomic DNA
ggtcccatggtgtaatggttagcactctgggctttgaatccagcaatccgagttcgaatcttggtgggacct

SEQ ID NO: 318 - DNA, 72 bp, Homo sapiens
  source 1..72: mol_type = genomic DNA
tccctggtggtctagtggttaggattcggcgctctcaccgccgcggcccgggttcgattcccggtcagggaa

SEQ ID NO: 319 - DNA, 72 bp, Homo sapiens; identical to SEQ ID NO: 318
  source 1..72: mol_type = genomic DNA

SEQ ID NO: 320 - DNA, 72 bp, Homo sapiens; identical to SEQ ID NO: 318
  source 1..72: mol_type = genomic DNA

SEQ ID NO: 321 - DNA, 72 bp, Homo sapiens; identical to SEQ ID NO: 318
  source 1..72: mol_type = genomic DNA

SEQ ID NO: 322 - DNA, 72 bp, Homo sapiens; identical to SEQ ID NO: 318
  source 1..72: mol_type = genomic DNA

SEQ ID NO: 323 - DNA, 72 bp, Homo sapiens; identical to SEQ ID NO: 318
  source 1..72: mol_type = genomic DNA

SEQ ID NO: 324 - DNA, 72 bp, Homo sapiens; identical to SEQ ID NO: 318
  source 1..72: mol_type = genomic DNA

SEQ ID NO: 325 - DNA, 72 bp, Homo sapiens
  source 1..72: mol_type = genomic DNA
tccctggtggtctagtggttaggattcggcgctctcaccgccgcggcccgggttcgattcccggtcaggaaa

SEQ ID NO: 326 - DNA, 72 bp, Homo sapiens
  source 1..72: mol_type = genomic DNA
tcccatatggtctagcggttaggattcctggttttcacccaggtggcccgggttcgactcccggtatgggaa

SEQ ID NO: 327 - DNA, 72 bp, Homo sapiens; identical to SEQ ID NO: 326
  source 1..72: mol_type = genomic DNA

SEQ ID NO: 328 - DNA, 72 bp, Homo sapiens
  source 1..72: mol_type = genomic DNA
tcccacatggtctagcggttaggattcctggttttcacccaggcggcccgggttcgactcccggtgtgggaa

SEQ ID NO: 329 - DNA, 72 bp, Homo sapiens; identical to SEQ ID NO: 328
  source 1..72: mol_type = genomic DNA

SEQ ID NO: 330 - DNA, 72 bp, Homo sapiens
  source 1..72: mol_type = genomic DNA
tccctggtggtctagtggctaggattcggcgctttcaccgccgcggcccgggttcgattcccggccagggaa

SEQ ID NO: 331 - DNA, 72 bp, Homo sapiens
  source 1..72: mol_type = genomic DNA
tccctggtggtctagtggctaggattcggcgctttcaccgccgcggcccgggttcgattcccggtcagggaa

SEQ ID NO: 332 - DNA, 72 bp, Homo sapiens; identical to SEQ ID NO: 331
  source 1..72: mol_type = genomic DNA

SEQ ID NO: 333 - DNA, 71 bp, Homo sapiens
  source 1..71: mol_type = genomic DNA
gcattggtggttcagtggtagaattctcgcctcccacgcgggagacccgggttcaattcccggccaatgca

SEQ ID NO: 334 - DNA, 71 bp, Homo sapiens; identical to SEQ ID NO: 333
  source 1..71: mol_type = genomic DNA

SEQ ID NO: 335 - DNA, 71 bp, Homo sapiens
  source 1..71: mol_type = genomic DNA
gcgccgctggtgtagtggtatcatgcaagattcccattcttgcgacccgggttcgattcccgggcggcgca

SEQ ID NO: 336 - DNA, 71 bp, Homo sapiens; identical to SEQ ID NO: 335
  source 1..71: mol_type = genomic DNA

SEQ ID NO: 337 - DNA, 71 bp, Homo sapiens
  source 1..71: mol_type = genomic DNA
gcattggtggttcaatggtagaattctcgcctcccacgcaggagacccaggttcgattcctggccaatgca

SEQ ID NO: 338 - DNA, 71 bp, Homo sapiens
  source 1..71: mol_type = genomic DNA
gcatgggtggttcagtggtagaattctcgcctgccacgcgggaggcccgggttcgattcccggcccatgca

SEQ ID NO: 339 - DNA, 71 bp, Homo sapiens; identical to SEQ ID NO: 338
  source 1..71: mol_type = genomic DNA

SEQ ID NO: 340 - DNA, 71 bp, Homo sapiens; identical to SEQ ID NO: 338
  source 1..71: mol_type = genomic DNA

SEQ ID NO: 341 - DNA, 71 bp, Homo sapiens; identical to SEQ ID NO: 338
  source 1..71: mol_type = genomic DNA

SEQ ID NO: 342 - DNA, 71 bp, Homo sapiens; identical to SEQ ID NO: 338
  source 1..71: mol_type = genomic DNA

SEQ ID NO: 343 - DNA, 71 bp, Homo sapiens
  source 1..71: mol_type = genomic DNA
gcattggtggttcagtggtagaattctcgcctgccacgcgggaggcccgggttcgattcccggccaatgca

SEQ ID NO: 344 - DNA, 71 bp, Homo sapiens; identical to SEQ ID NO: 343
  source 1..71: mol_type = genomic DNA

SEQ ID NO: 345 - DNA, 71 bp, Homo sapiens; identical to SEQ ID NO: 343
  source 1..71: mol_type = genomic DNA

SEQ ID NO: 346 - DNA, 71 bp, Homo sapiens; identical to SEQ ID NO: 343
  source 1..71: mol_type = genomic DNA

SEQ ID NO: 347 - DNA, 71 bp, Homo sapiens; identical to SEQ ID NO: 343
  source 1..71: mol_type = genomic DNA

SEQ ID NO: 348 - DNA, 71 bp, Homo sapiens; identical to SEQ ID NO: 343
  source 1..71: mol_type = genomic DNA

SEQ ID NO: 349 - DNA, 71 bp, Homo sapiens
  source 1..71: mol_type = genomic DNA
gcattggtggttcagtggtagaattctcgcctgccacgcgggaggcccgggtttgattcccggccagtgca

SEQ ID NO: 350 - DNA, 71 bp, Homo sapiens
  source 1..71: mol_type = genomic DNA
gcataggtggttcagtggtagaattcttgcctgccacgcaggaggcccaggtttgattcctggcccatgca

SEQ ID NO: 351 - DNA, 71 bp, Homo sapiens
  source 1..71: mol_type = genomic DNA
gcattggtggttcagtggtagaattctcgcctgccatgcgggcggccgggcttcgattcctggccaatgca

SEQ ID NO: 352 - DNA, 72 bp, Homo sapiens
  source 1..72: mol_type = genomic DNA
gcgttggtggtatagtggttagcatagctgccttccaagcagttgacccgggttcgattcccggccaacgca

SEQ ID NO: 353 - DNA, 72 bp, Homo sapiens
  source 1..72: mol_type = genomic DNA
gcgttggtggtatagtggtgagcatagctgccttccaagcagttgacccgggttcgattcccggccaacgca

SEQ ID NO: 354 - DNA, 72 bp, Homo sapiens; identical to SEQ ID NO: 353
  source 1..72: mol_type = genomic DNA

SEQ ID NO: 355 - DNA, 72 bp, Homo sapiens; identical to SEQ ID NO: 353
  source 1..72: mol_type = genomic DNA

SEQ ID NO: 356 - DNA, 72 bp, Homo sapiens; identical to SEQ ID NO: 353
  source 1..72: mol_type = genomic DNA

SEQ ID NO: 357 - DNA, 72 bp, Homo sapiens; identical to SEQ ID NO: 353
  source 1..72: mol_type = genomic DNA

SEQ ID NO: 358 - DNA, 72 bp, Homo sapiens; identical to SEQ ID NO: 353
  source 1..72: mol_type = genomic DNA

SEQ ID NO: 359 - DNA, 72 bp, Homo sapiens
  source 1..72: mol_type = genomic DNA
gcgttggtggtatagtggtaagcatagctgccttccaagcagttgacccgggttcgattcccggccaacgca

SEQ ID NO: 360 - DNA, 72 bp, Homo sapiens
  source 1..72: mol_type = genomic DNA
gcgttggtggtatagtggtgagcatagttgccttccaagcagttgacccgggctcgattcccgcccaacgca

SEQ ID NO: 361 - DNA, 72 bp, Homo sapiens
  source 1..72: mol_type = genomic DNA
gccgtgatcgtatagtggttagtactctgcgttgtggccgcagcaacctcggttcgaatccgagtcacggca

SEQ ID NO: 362 - DNA, 72 bp, Homo sapiens; identical to SEQ ID NO: 361
  source 1..72: mol_type = genomic DNA

SEQ ID NO: 363 - DNA, 72 bp, Homo sapiens; identical to SEQ ID NO: 361
  source 1..72: mol_type = genomic DNA

SEQ ID NO: 364 - DNA, 72 bp, Homo sapiens; identical to SEQ ID NO: 361
  source 1..72: mol_type = genomic DNA

SEQ ID NO: 365 - DNA, 72 bp, Homo sapiens; identical to SEQ ID NO: 361
  source 1..72: mol_type = genomic DNA

SEQ ID NO: 366 - DNA, 72 bp, Homo sapiens; identical to SEQ ID NO: 361
  source 1..72: mol_type = genomic DNA

SEQ ID NO: 367 - DNA, 72 bp, Homo sapiens; identical to SEQ ID NO: 361
  source 1..72: mol_type = genomic DNA

SEQ ID NO: 368 - DNA, 72 bp, Homo sapiens; identical to SEQ ID NO: 361
  source 1..72: mol_type = genomic DNA

SEQ ID NO: 369 - DNA, 72 bp, Homo sapiens; identical to SEQ ID NO: 361
  source 1..72: mol_type = genomic DNA

SEQ ID NO: 370 - DNA, 74 bp, Homo sapiens
  source 1..74: mol_type = genomic DNA
ggccggttagctcagttggttagagcgtggcgctaataacgccaaggtcgcgggttcgatccccgtacgggcca

SEQ ID NO: 371 - DNA, 74 bp, Homo sapiens
  source 1..74: mol_type = genomic DNA
ggccggttagctcagtcggttagagcgtggtgctaataacgccaaggtcgcgggttcgatccccgtgccggtca

SEQ ID NO: 372 - DNA, 74 bp, Homo sapiens
  source 1..74: mol_type = genomic DNA
ggccggttagctcagttggttagagcgtggtgctaataacgccaaggtcgcgggttcgatccccgtactggcca

SEQ ID NO: 373 - DNA, 74 bp, Homo sapiens
  source 1..74: mol_type = genomic DNA
ggctggttagctcagttggttagagcgtggtgctaataacgccaaggtcgcgggttcgatccccgtactggcca

SEQ ID NO: 374 - DNA, 74 bp, Homo sapiens
  source 1..74: mol_type = genomic DNA
ggccggttagctcagttggttagagcgtggtgctaataacgccaaggtcgcgggttcgaaccccgtacgggcca

SEQ ID NO: 375 - DNA, 74 bp, Homo sapiens
  source 1..74: mol_type = genomic DNA
ggccggttagctcagttggttagagcgtggtgctaataacgccaaggtcgcgggttcgatccccgtacgggcca

SEQ ID NO: 376 - DNA, 74 bp, Homo sapiens; identical to SEQ ID NO: 375
  source 1..74: mol_type = genomic DNA

SEQ ID NO: 377 - DNA, 74 bp, Homo sapiens; identical to SEQ ID NO: 375
  source 1..74: mol_type = genomic DNA

SEQ ID NO: 378 - DNA, 74 bp, Homo sapiens; identical to SEQ ID NO: 375
  source 1..74: mol_type = genomic DNA

SEQ ID NO: 379 - DNA, 74 bp, Homo sapiens; identical to SEQ ID NO: 375
  source 1..74: mol_type = genomic DNA

SEQ ID NO: 380 - DNA, 74 bp, Homo sapiens
  source 1..74: mol_type = genomic DNA
ggccggttagctcagttggttagagcgtggtgctaataacgctaaggtcgcgggttcgatccccgtactggcca

SEQ ID NO: 381 - DNA, 74 bp, Homo sapiens
  source 1..74: mol_type = genomic DNA
ggccggttagctcagttggtcagagcgtggtgctaataacgccaaggtcgcgggttcgatccccgtacgggcca

SEQ ID NO: 382 - DNA, 74 bp, Homo sapiens; identical to SEQ ID NO: 381
  source 1..74: mol_type = genomic DNA

SEQ ID NO: 383 - DNA, 74 bp, Homo sapiens
  source 1..74: mol_type = genomic DNA
ggccggttagctcagtcggctagagcgtggtgctaataacgccaaggtcgcgggttcgatccccgtacgggcca

SEQ ID NO: 384 - DNA, 74 bp, Homo sapiens
  source 1..74: mol_type = genomic DNA
ggctggttagttcagttggttagagcgtggtgctaataacgccaaggtcgtgggttcgatccccatatcggcca

SEQ ID NO: 385 - DNA, 74 bp, Homo sapiens
  source 1..74: mol_type = genomic DNA
ggccggttagctcagttggtaagagcgtggtgctgataacaccaaggtcgcgggctcgactcccgcaccggcca

SEQ ID NO: 386 - DNA, 74 bp, Homo sapiens; identical to SEQ ID NO: 385
  source 1..74: mol_type = genomic DNA

SEQ ID NO: 387 - DNA, 74 bp, Homo sapiens; identical to SEQ ID NO: 385
  source 1..74: mol_type = genomic DNA

SEQ ID NO: 388 - DNA, 93 bp, Homo sapiens
  source 1..93: mol_type = genomic DNA
gctccagtggcgcaatcggttagcgcgcggtacttatatgacagtgcgagcggagcaatgccgaggttgtgagttcgatcctcacctggagca

SEQ ID NO: 389 - DNA, 93 bp, Homo sapiens
  source 1..93: mol_type = genomic DNA
gctccagtggcgcaatcggttagcgcgcggtacttatacagcagtacatgcagagcaatgccgaggttgtgagttcgagcctcacctggagca

SEQ ID NO: 390 - DNA, 94 bp, Homo sapiens
  source 1..94: mol_type = genomic DNA
gctccagtggcgcaatcggttagcgcgcggtacttatatggcagtatgtgtgcgagtgatgccgaggttgtgagttcgagcctcacctggagca

SEQ ID NO: 391 - DNA, 94 bp, Homo sapiens
  source 1..94: mol_type = genomic DNA
gctccagtggcgcaatcggttagcgcgcggtacttatacaacagtatatgtgcgggtgatgccgaggttgtgagttcgagcctcacctggagca

SEQ ID NO: 392 - DNA, 94 bp, Homo sapiens
  source 1..94: mol_type = genomic DNA
gctccagtggcgcaatcggttagcgcgcggtacttataagacagtgcacctgtgagcaatgccgaggttgtgagttcaagcctcacctggagca

SEQ ID NO: 393 - DNA, 82 bp, Homo sapiens
  source 1..82: mol_type = genomic DNA
ggtagcgtggccgagcggtctaaggcgctggattaaggctccagtctcttcggaggcgtgggttcgaatcccaccgctgcca

SEQ ID NO: 394 - DNA, 82 bp, Homo sapiens; identical to SEQ ID NO: 393
  source 1..82: mol_type = genomic DNA

SEQ ID NO: 395 - DNA, 82 bp, Homo sapiens; identical to SEQ ID NO: 393
  source 1..82: mol_type = genomic DNA

SEQ ID NO: 396 - DNA, 82 bp, Homo sapiens
  source 1..82: mol_type = genomic DNA
ggtagcgtggccgagcggtctaaggcgctggattaaggctccagtctcttcgggggcgtgggttcgaatcccaccgctgcca

SEQ ID NO: 397 - DNA, 82 bp, Homo sapiens; identical to SEQ ID NO: 396
  source 1..82: mol_type = genomic DNA

SEQ ID NO: 398 - DNA, 82 bp, Homo sapiens; identical to SEQ ID NO: 396
  source 1..82: mol_type = genomic DNA

SEQ ID NO: 399 - DNA, 82 bp, Homo sapiens; identical to SEQ ID NO: 396
  source 1..82: mol_type = genomic DNA

SEQ ID NO: 400 - DNA, 82 bp, Homo sapiens
  source 1..82: mol_type = genomic DNA
ggtagcgtggccgagcggtctaaggcgctggattaaggctccagtctcttcgggggcgtgggttcaaatcccaccgctgcca

SEQ ID NO: 401 - DNA, 82 bp, Homo sapiens
  source 1..82: mol_type = genomic DNA
ggtagcgtggccgagtggtctaagacgctggattaaggctccagtctcttcgggggcgtgggtttgaatcccaccgctgcca

SEQ ID NO: 402 - DNA, 106 bp, Homo sapiens
  source 1..106: mol_type = genomic DNA
gtcaggatggccgagtggtctaaggcgccagactcaagctaagcttcctccgcggtggggattctggtctccaatggaggcgtgggttcgaatcccacttctgaca

SEQ ID NO: 403 - DNA, 105 bp, Homo sapiens
  source 1..105: mol_type = genomic DNA
gtcaggatggccgagtggtctaaggcgccagactcaagcttggcttcctcgtgttgaggattctggtctccaatggaggcgtgggttcgaatcccacttctgaca

SEQ ID NO: 404 - DNA, 108 bp, Homo sapiens
  source 1..108: mol_type = genomic DNA
gtcaggatggccgagtggtctaaggcgccagactcaagcttactgcttcctgtgttcgggtcttctggtctccgtatggaggcgtgggttcgaatcccacttctgaca

SEQ ID NO: 405 - DNA, 107 bp, Homo sapiens
  source 1..107: mol_type = genomic DNA
gtcaggatggccgagtggtctaaggcgccagactcaagttgctacttcccaggtttggggcttctggtctccgcatggaggcgtgggttcgaatcccacttctgaca

SEQ ID NO: 406 - DNA, 106 bp, Homo sapiens
  source 1..106: mol_type = genomic DNA
gtcaggatggccgagtggtctaaggcgccagactcaaggtaagcaccttgcctgcgggctttctggtctccggatggaggcgtgggttcgaatcccacttctgaca

SEQ ID NO: 407 - DNA, 74 bp, Homo sapiens
  source 1..74: mol_type = genomic DNA
gcctccttagtgcagtaggtagcgcatcagtctcaaaatctgaatggtcctgagttcaagcctcagagggggca

SEQ ID NO: 408 - DNA, 84 bp, Homo sapiens
  source 1..84: mol_type = genomic DNA
gtcaggatggccgagcagtcttaaggcgctgcgttcaaatcgcaccctccgctggaggcgtgggttcgaatcccacttttgaca

SEQ ID NO: 409 - DNA, 83 bp, Homo sapiens
  source 1..83: mol_type = genomic DNA
gtcaggatggccgagcggtctaaggcgctgcgttcaggtcgcagtctcccctggaggcgtgggttcgaatcccactcctgaca

SEQ ID NO: 410 - DNA, 83 bp, Homo sapiens; identical to SEQ ID NO: 409
  source 1..83: mol_type = genomic DNA

SEQ ID NO: 411 - DNA, 83 bp, Homo sapiens; identical to SEQ ID NO: 409
  source 1..83: mol_type = genomic DNA

SEQ ID NO: 412 - DNA, 83 bp, Homo sapiens; identical to SEQ ID NO: 409
  source 1..83: mol_type = genomic DNA

SEQ ID NO: 413 - DNA, 83 bp, Homo sapiens; identical to SEQ ID NO: 409
  source 1..83: mol_type = genomic DNA

SEQ ID NO: 414 - DNA, 83 bp, Homo sapiens; identical to SEQ ID NO: 409
  source 1..83: mol_type = genomic DNA

SEQ ID NO: 415 - DNA, 83 bp, Homo sapiens; identical to SEQ ID NO: 409
  source 1..83: mol_type = genomic DNA

SEQ ID NO: 416 - DNA, 83 bp, Homo sapiens
  source 1..83: mol_type = genomic DNA
gtcaggatggccgagcggtctaaggcgctgcgttcaggtcgcagtctcccctggaggcgtgggttcgaatcccacttctgaca

SEQ ID NO: 417 - DNA, 83 bp, Homo sapiens; identical to SEQ ID NO: 416
  source 1..83: mol_type = genomic DNA

SEQ ID NO: 418 - DNA, 83 bp, Homo sapiens
  source 1..83: mol_type = genomic DNA
accaggatggccgagtggttaaggcgttggacttaagatccaatggacatatgtccgcgtgggttcgaaccccactcctggta

SEQ ID NO: 419 - DNA, 83 bp, Homo sapiens
  source 1..83: mol_type = genomic DNA
accgggatggccgagtggttaaggcgttggacttaagatccaatgggctggtgcccgcgtgggttcgaaccccactctcggta

SEQ ID NO: 420 - DNA, 83 bp, Homo sapiens
  source 1..83: mol_type = genomic DNA
accagaatggccgagtggttaaggcgttggacttaagatccaatggattcatatccgcgtgggttcgaaccccacttctggta

SEQ ID NO: 421 - DNA, 83 bp, Homo sapiens
  source 1..83: mol_type = genomic DNA
accgggatggctgagtggttaaggcgttggacttaagatccaatggacaggtgtccgcgtgggttcgagccccactcccggta

SEQ ID NO: 422 - DNA, 82 bp, Homo sapiens
  source 1..82: mol_type = genomic DNA
ggtagcgtggccgagcggtctaaggcgctggatttaggctccagtctcttcggaggcgtgggttcgaatcccaccgctgcca

SEQ ID NO: 423 - DNA, 82 bp, Homo sapiens
  source 1..82: mol_type = genomic DNA
ggtagtgtggccgagcggtctaaggcgctggatttaggctccagtctcttcgggggcgtgggttcgaatcccaccactgcca

SEQ ID NO: 424 - DNA, 82 bp, Homo sapiens
  source 1..82: mol_type = genomic DNA
ggtagcgtggccgagtggtctaaggcgctggatttaggctccagtcatttcgatggcgtgggttcgaatcccaccgctgcca

SEQ ID NO: 425 - DNA, 73 bp, Homo sapiens
  source 1..73: mol_type = genomic DNA
gcccggctagctcagtcggtagagcatgggactcttaatcccagggtcgtgggttcgagccccacgttgggcg

SEQ ID NO: 426 - DNA, 73 bp, Homo sapiens; identical to SEQ ID NO: 425
  source 1..73: mol_type = genomic DNA

SEQ ID NO: 427 - DNA, 73 bp, Homo sapiens
  source 1..73: mol_type = genomic DNA
gcccagctagctcagtcggtagagcataagactcttaatctcagggttgtggattcgtgccccatgctgggtg

SEQ ID NO: 428 - DNA, 74 bp, Homo sapiens
  source 1..74: mol_type = genomic DNA
gcagctagctcagtcggtagagcatgagactcttaatctcagggtcatgggttcgtgccccatgttgggtgcca

SEQ ID NO: 429 - DNA, 73 bp, Homo sapiens
  source 1..73: mol_type = genomic DNA
gcccggctagctcagtcggtagagcatgagactcttaatctcagggtcgtgggttcgagccccacgttgggcg

SEQ ID NO: 430 - DNA, 73 bp, Homo sapiens; identical to SEQ ID NO: 429
  source 1..73: mol_type = genomic DNA

SEQ ID NO: 431 - DNA, 73 bp, Homo sapiens; identical to SEQ ID NO: 429
  source 1..73: mol_type = genomic DNA

SEQ ID NO: 432 - DNA, 73 bp, Homo sapiens; identical to SEQ ID NO: 429
  source 1..73: mol_type = genomic DNA

SEQ ID NO: 433 - DNA, 73 bp, Homo sapiens; identical to SEQ ID NO: 429
  source 1..73: mol_type = genomic DNA

SEQ ID NO: 434 - DNA, 73 bp, Homo sapiens
  source 1..73: mol_type = genomic DNA
gcccggctagctcagtcggtagagcatgagacccttaatctcagggtcgtgggttcgagccccacgttgggcg

SEQ ID NO: 435 - DNA, 73 bp, Homo sapiens
  source 1..73: mol_type = genomic DNA
gcccggctagctcagtcggtagagcatgggactcttaatctcagggtcgtgggttcgagccccacgttgggcg

SEQ ID NO: 436 - DNA, 73 bp, Homo sapiens
  source 1..73: mol_type = genomic DNA
gcccggctagctcagtcgatagagcatgagactcttaatctcagggtcgtgggttcgagccgcacgttgggcg

SEQ ID NO: 437 - DNA, 73 bp, Homo sapiens
  source 1..73: mol_type = genomic DNA
gcccagctagctcagtcggtagagcatgagactcttaatctcagggtcatgggtttgagccccacgtttggtg

SEQ ID NO: 438 - DNA, 73 bp, Homo sapiens
  source 1..73: mol_type = genomic DNA
gcctggctagctcagtcggcaaagcatgagactcttaatctcagggtcgtgggctcgagctccatgttgggcg

SEQ ID NO: 439 - DNA, 73 bp, Homo sapiens
  source 1..73: mol_type = genomic DNA
gcccgactacctcagtcggtggagcatgggactcttcatcccagggttgtgggttcgagccccacattgggca

SEQ ID NO: 440 - DNA, 73 bp, Homo sapiens
  source 1..73: mol_type = genomic DNA
gcctggatagctcagttggtagagcatcagacttttaatctgagggtccagggttcaagtccctgttcaggca

SEQ ID NO: 441 - DNA, 73 bp, Homo sapiens
  source 1..73: mol_type = genomic DNA
acccagatagctcagtcagtagagcatcagacttttaatctgagggtccaaggttcatgtccctttttgggtg

SEQ ID NO: 442 - DNA, 73 bp, Homo sapiens
  source 1..73: mol_type = genomic DNA
gcctggatagctcagttggtagagcatcagacttttaatctgagggtccagggttcaagtccctgttcaggcg

SEQ ID NO: 443 - DNA, 73 bp, Homo sapiens
  source 1..73: mol_type = genomic DNA
gcccggatagctcagtcggtagagcatcagacttttaatctgagggtccagggttcaagtccctgttcgggcg

SEQ ID NO: 444 - DNA, 73 bp, Homo sapiens; identical to SEQ ID NO: 443
  source 1..73: mol_type = genomic DNA

SEQ ID NO: 445 - DNA, 73 bp, Homo sapiens; identical to SEQ ID NO: 443
  source 1..73: mol_type = genomic DNA

SEQ ID NO: 446 - DNA, 73 bp, Homo sapiens; identical to SEQ ID NO: 443
  source 1..73: mol_type = genomic DNA

SEQ ID NO: 447 - DNA, 73 bp, Homo sapiens; identical to SEQ ID NO: 443
  source 1..73: mol_type = genomic DNA

SEQ ID NO: 448 - DNA, 73 bp, Homo sapiens
  source 1..73: mol_type = genomic DNA
gcctggatagctcagtcggtagagcatcagacttttaatctgagggtccagggttcaagtccctgttcaggcg

SEQ ID NO: 449 - DNA, 73 bp, Homo sapiens
  source 1..73: mol_type = genomic DNA
gcccggatagctcagtcggtagagcatcagacttttaatctgagggtccggggttcaagtccctgttcgggcg

SEQ ID NO: 450 - DNA, 73 bp, Homo sapiens
  source 1..73: mol_type = genomic DNA
gcctgggtagctcagtcggtagagcatcagacttttaatctgagggtccagggttcaagtccctgtccaggcg

SEQ ID NO: 451 - DNA, 73 bp, Homo sapiens
  source 1..73: mol_type = genomic DNA
gcctggatagctcagttggtagaacatcagacttttaatctgacggtgcagggttcaagtccctgttcaggcg

SEQ ID NO: 452 - DNA, 73 bp, Homo sapiens
  source 1..73: mol_type = genomic DNA
gcctcgttagcgcagtaggtagcgcgtcagtctcataatctgaaggtcgtgagttcgatcctcacacggggca

SEQ ID NO: 453 - DNA, 73 bp, Homo sapiens
  source 1..73: mol_type = genomic DNA
gccctcttagcgcagtgggcagcgcgtcagtctcataatctgaaggtcctgagttcgagcctcagagagggca

SEQ ID NO: 454 - DNA, 73 bp, Homo sapiens
  source 1..73: mol_type = genomic DNA
gcctccttagcgcagtaggcagcgcgtcagtctcataatctgaaggtcctgagttcgaacctcagagggggca

SEQ ID NO: 455 - DNA, 73 bp, Homo sapiens; identical to SEQ ID NO: 454
  source 1..73: mol_type = genomic DNA

SEQ ID NO: 456 - DNA, 73 bp, Homo sapiens
  source 1..73: mol_type = genomic DNA
gccctcttagcgcagcgggcagcgcgtcagtctcataatctgaaggtcctgagttcgagcctcagagagggca

SEQ ID NO: 457 - DNA, 73 bp, Homo sapiens; identical to SEQ ID NO: 456
  source 1..73: mol_type = genomic DNA

SEQ ID NO: 458 - DNA, 73 bp, Homo sapiens; identical to SEQ ID NO: 456
  source 1..73: mol_type = genomic DNA

SEQ ID NO: 459 - DNA, 73 bp, Homo sapiens
  source 1..73: mol_type = genomic DNA
gccctcttagcgcagctggcagcgcgtcagtctcataatctgaaggtcctgagttcaagcctcagagagggca

SEQ ID NO: 460 - DNA, 73 bp, Homo sapiens; identical to SEQ ID NO: 459
  source 1..73: mol_type = genomic DNA

SEQ ID NO: 461 - DNA, 73 bp, Homo sapiens
  source 1..73: mol_type = genomic DNA
gcctcgttagcgcagtaggcagcgcgtcagtctcataatctgaaggtcgtgagttcgagcctcacacggggca

SEQ ID NO: 462 - DNA, 73 bp, Homo sapiens
  source 1..73: mol_type = genomic DNA
gccctcttagtgcagctggcagcgcgtcagtttcataatctgaaagtcctgagttcaagcctcagagagggca

SEQ ID NO: 463 - DNA, 73 bp, Homo sapiens
  source 1..73: mol_type = genomic DNA
gccgaaatagctcagttgggagagcgttagactgaagatctaaaggtccctggttcgatcccgggtttcggca

SEQ ID NO: 464 - DNA, 73 bp, Homo sapiens; identical to SEQ ID NO: 463
  source 1..73: mol_type = genomic DNA

SEQ ID NO: 465 - DNA, 73 bp, Homo sapiens; identical to SEQ ID NO: 463
  source 1..73: mol_type = genomic DNA

SEQ ID NO: 466 - DNA, 73 bp, Homo sapiens; identical to SEQ ID NO: 463
  source 1..73: mol_type = genomic DNA

SEQ ID NO: 467 - DNA, 73 bp, Homo sapiens; identical to SEQ ID NO: 463
  source 1..73: mol_type = genomic DNA

SEQ ID NO: 468 - DNA, 73 bp, Homo sapiens; identical to SEQ ID NO: 463
  source 1..73: mol_type = genomic DNA

SEQ ID NO: 469 - DNA, 73 bp, Homo sapiens
  source 1..73: mol_type = genomic DNA
gccgaaatagctcagttgggagagcgttagactgaagatctaaaggtccctggttcaatcccgggtttcggca

SEQ ID NO: 470 - DNA, 73 bp, Homo sapiens
  source 1..73: mol_type = genomic DNA
gccgagatagctcagttgggagagcgttagactgaagatctaaaggtccctggttcaatcccgggtttcggca

SEQ ID NO: 471 - DNA, 74 bp, Homo sapiens
  source 1..74: mol_type = genomic DNA
gccgaaatagctcagttgggagagcgttagaccgaagatcttaaaggtccctggttcaatcccgggtttcggca

SEQ ID NO: 472 - DNA, 74 bp, Homo sapiens
  source 1..74: mol_type = genomic DNA
gctgaaatagctcagttgggagagcgttagactgaagatcttaaagttccctggttcaaccctgggtttcagcc

SEQ ID NO: 473 - DNA, 72 bp, Homo sapiens
  source 1..72: mol_type = genomic DNA
ggctcgttggtctaggggtatgattctcgcttaggatgcgagaggtcccgggttcaaatcccggacgagccc

SEQ ID NO: 474 - DNA, 72 bp, Homo sapiens
  source 1..72: mol_type = genomic DNA
ggctcgttggtctaggggtatgattctcgcttagggtgcgagaggtcccgggttcaaatcccggacgagccc

SEQ ID NO: 475 - DNA, 72 bp, Homo sapiens; identical to SEQ ID NO: 474
  source 1..72: mol_type = genomic DNA

SEQ ID NO: 476 - DNA, 72 bp, Homo sapiens; identical to SEQ ID NO: 474
  source 1..72: mol_type = genomic DNA

SEQ ID NO: 477 - DNA, 72 bp, Homo sapiens; identical to SEQ ID NO: 474
  source 1..72: mol_type = genomic DNA

SEQ ID NO: 478 - DNA, 72 bp, Homo sapiens; identical to SEQ ID NO: 474
  source 1..72: mol_type = genomic DNA

SEQ ID NO: 479 - DNA, 72 bp, Homo sapiens; identical to SEQ ID NO: 474
  source 1..72: mol_type = genomic DNA

SEQ ID NO: 480 - DNA, 72 bp, Homo sapiens; identical to SEQ ID NO: 474
  source 1..72: mol_type = genomic DNA

SEQ ID NO: 481 - DNA, 72 bp, Homo sapiens; identical to SEQ ID NO: 474
  source 1..72: mol_type = genomic DNA

SEQ ID NO: 482 - DNA, 72 bp, Homo sapiens
  source 1..72: mol_type = genomic DNA
ggctcgttggtctaggggtatgattctcgcttcgggtgcgagaggtcccgggttcaaatcccggacgagccc

SEQ ID NO: 483 - DNA, 72 bp, Homo sapiens; identical to SEQ ID NO: 482
  source 1..72: mol_type = genomic DNA

SEQ ID NO: 484 - DNA, 72 bp, Homo sapiens; identical to SEQ ID NO: 482
  source 1..72: mol_type = genomic DNA

SEQ ID NO: 485 - DNA, 72 bp, Homo sapiens
  source 1..72: mol_type = genomic DNA
ggctcgttggtctaggggtatgattctcgcttcgggtgtgagaggtcccgggttcaaatcccggacgagccc

SEQ ID NO: 486 - DNA, 72 bp, Homo sapiens
  source 1..72: mol_type = genomic DNA
ggctcgttggtctagtggtatgattctcgctttgggtgcgagaggtcccgggttcaaatcccggacgagccc

SEQ ID NO: 487 - DNA, 72 bp, Homo sapiens
  source 1..72: mol_type = genomic DNA
ggctcgttggtctaggggtatgattctcggtttgggtccgagaggtcccgggttcaaatcccggacgagccc

SEQ ID NO: 488 - DNA, 72 bp, Homo sapiens
  source 1..72: mol_type = genomic DNA
ggctcgttggtctaggggtatgattctcgctttgggtgcgagaggtcccgggttcaaatcccggacgagccc

SEQ ID NO: 489 - DNA, 72 bp, Homo sapiens; identical to SEQ ID NO: 488
  source 1..72: mol_type = genomic DNA

SEQ ID NO: 490 - DNA, 72 bp, Homo sapiens; identical to SEQ ID NO: 488
  source 1..72: mol_type = genomic DNA

SEQ ID NO: 491 - DNA, 72 bp, Homo sapiens; identical to SEQ ID NO: 488
  source 1..72: mol_type = genomic DNA

SEQ ID NO: 492 - DNA, 72 bp, Homo sapiens; identical to SEQ ID NO: 488
  source 1..72: mol_type = genomic DNA

SEQ ID NO: 493 - DNA, 87 bp, Homo sapiens
  source 1..87: mol_type = genomic DNA
gcccggatgatcctcagtggtctggggtgcaggcttcaaacctgtagctgtctagcgacagagtggttcaattccacctttcgggcg

SEQ ID NO: 494 - DNA, 82 bp, Homo sapiens
  source 1..82: mol_type = genomic DNA
gtagtcgtggccgagtggttaaggcgatggactagaaatccattggggtttccccgcgcaggttcgaatcctgccgactacg

SEQ ID NO: 495 - DNA, 82 bp, Homo sapiens
  source 1..82: mol_type = genomic DNA
gtagtcgtggccgagtggttaaggcgatggactagaaatccattggggtctccccgcgcaggttcgaatcctgccgactacg

SEQ ID NO: 496 - DNA, 82 bp, Homo sapiens; identical to SEQ ID NO: 495
  source 1..82: mol_type = genomic DNA

SEQ ID NO: 497 - DNA, 82 bp, Homo sapiens; identical to SEQ ID NO: 495
  source 1..82: mol_type = genomic DNA

SEQ ID NO: 498 - DNA, 82 bp, Homo sapiens; identical to SEQ ID NO: 495
  source 1..82: mol_type = genomic DNA

SEQ ID NO: 499 - DNA, 82 bp, Homo sapiens; identical to SEQ ID NO: 495
  source 1..82: mol_type = genomic DNA

SEQ ID NO: 500 - DNA, 82 bp, Homo sapiens; identical to SEQ ID NO: 495
  source 1..82: mol_type = genomic DNA

SEQ ID NO: 501 - DNA, 82 bp, Homo sapiens
  source 1..82: mol_type = genomic DNA
gtagtcgtggccgagtggttaaggcgatggactagaaatccattggggtttccccacgcaggttcgaatcctgccgactacg

SEQ ID NO: 502 - DNA, 82 bp, Homo sapiens
  source 1..82: mol_type = genomic DNA
gtagtcgtggccgagtggttaaggtgatggactagaaacccattggggtctccccgcgcaggttcgaatcctgccgactacg

SEQ ID NO: 503 - DNA, 82 bp, Homo sapiens
  source 1..82: mol_type = genomic DNA
gctgtgatggccgagtggttaaggcgttggactcgaaatccaatggggtctccccgcgcaggttcgaatcctgctcacagcg

SEQ ID NO: 504 - DNA, 82 bp, Homo sapiens
  source 1..82: mol_type = genomic DNA
gctgtgatggccgagtggttaaggcgttggactcgaaatccaatggggtctccccgcgcaggttcaaatcctgctcacagcg

SEQ ID NO: 505 - DNA, 82 bp, Homo sapiens
  source 1..82: mol_type = genomic DNA
gctgtgatggccgagtggttaaggtgttggactcgaaatccaatgggggttccccgcgcaggttcaaatcctgctcacagcg

SEQ ID NO: 506 - DNA, 82 bp, Homo sapiens
  source 1..82: mol_type = genomic DNA
gtcacggtggccgagtggttaaggcgttggactcgaaatccaatggggtttccccgcacaggttcgaatcctgttcgtgacg

SEQ ID NO: 507 - DNA, 82 bp, Homo sapiens
  source 1..82: mol_type = genomic DNA
gacgaggtggccgagtggttaaggcgatggactgctaatccattgtgctctgcacgcgtgggttcgaatcccaccctcgtcg

SEQ ID NO: 508 - DNA, 82 bp, Homo sapiens
  source 1..82: mol_type = genomic DNA
gacgaggtggccgagtggttaaggcgatggactgctaatccattgtgctctgcacgcgtgggttcgaatcccaccttcgtcg

SEQ ID NO: 509 - DNA, 82 bp, Homo sapiens
  source 1..82: mol_type = genomic DNA
gacgaggtggccgagtggttaaggcgatggactgctaatccattgtgctttgcacgcgtgggttcgaatcccatcctcgtcg

SEQ ID NO: 510 - DNA, 82 bp, Homo sapiens
  source 1..82: mol_type = genomic DNA
gacgaggtggccgagtggttaaggcgatggactgctaatccattgtgctctgcacgcgtgggttcgaatcccatcctcgtcg

SEQ ID NO: 511 - DNA, 82 bp, Homo sapiens; identical to SEQ ID NO: 510
  source 1..82: mol_type = genomic DNA

SEQ ID NO: 512 - DNA, 82 bp, Homo sapiens; identical to SEQ ID NO: 510
  source 1..82: mol_type = genomic DNA

SEQ ID NO: 513 - DNA, 82 bp, Homo sapiens
  source 1..82: mol_type = genomic DNA
gacgaggtggccgagtggttaaggcgatggactgctaatccattgtgctctgcacacgtgggttcgaatcccatcctcgtcg

SEQ ID NO: 514 - DNA, 84 bp, Homo sapiens
  source 1..84: mol_type = genomic DNA
ggagaggcctggccgagtggttaaggcgatggactgctaatccattgtgctctgcacgcgtgggttcgaatcccatcctcgtcg

SEQ ID NO: 515 - DNA, 82 bp, Homo sapiens
  source 1..82: mol_type = genomic DNA
gcagcgatggccgagtggttaaggcgttggacttgaaatccaatggggtctccccgcgcaggttcgaaccctgctcgctgcg

SEQ ID NO: 516 - DNA, 82 bp, Homo sapiens
  source 1..82: mol_type = genomic DNA
gtagtcgtggccgagtggttaaggcgatggacttgaaatccattggggtttccccgcgcaggttcgaatcctgccgactacg

SEQ ID NO: 517 - DNA, 82 bp, Homo sapiens
  source 1..82: mol_type = genomic DNA
gtagtcgtggccgagtggttaaggcgatggacttgaaatccattggggtctccccgcgcaggttcgaatcctgccgactacg

SEQ ID NO: 518 - DNA, 82 bp, Homo sapiens
  source 1..82: mol_type = genomic DNA
gtagtcgtggccgagtggttaaggcgatggacttgaaatccattggggtttccccgcgcaggttcgaatcctgtcggctacg

SEQ ID NO: 519 - DNA, 74 bp, Homo sapiens
  source 1..74: mol_type = genomic DNA
ggcgccgtggcttagttggttaaagcgcctgtctagtaaacaggagatcctgggttcgaatcccagcggtgcct

SEQ ID NO: 520 - DNA, 74 bp, Homo sapiens; identical to SEQ ID NO: 519
  source 1..74: mol_type = genomic DNA

SEQ ID NO: 521 - DNA, 74 bp, Homo sapiens; identical to SEQ ID NO: 519
  source 1..74: mol_type = genomic DNA

SEQ ID NO: 522 - DNA, 74 bp, Homo sapiens
  source 1..74: mol_type = genomic DNA
ggctccgtggcttagctggttaaagcgcctgtctagtaaacaggagatcctgggttcgaatcccagcggggcct

SEQ ID NO: 523 - DNA, 74 bp, Homo sapiens; identical to SEQ ID NO: 522
  source 1..74: mol_type = genomic DNA

SEQ ID NO: 524 - DNA, 74 bp, Homo sapiens
  source 1..74: mol_type = genomic DNA
ggctccgtagcttagttggttaaagcgcctgtctagtaaacaggagatcctgggttcgactcccagcggggcct

SEQ ID NO: 525 - DNA, 74 bp, Homo sapiens
  source 1..74: mol_type = genomic DNA
ggcttcgtggcttagctggttaaagcgcctgtctagtaaacaggagatcctgggttcgaatcccagcgaggcct

SEQ ID NO: 526 - DNA, 74 bp, Homo sapiens
  source 1..74: mol_type = genomic DNA
ggcgccgtggcttagctggttaaagcgcctgtctagtaaacaggagatcctgggttcgaatcccagcggtgcct

SEQ ID NO: 527 - DNA, 74 bp, Homo sapiens
  source 1..74: mol_type = genomic DNA
ggccctgtggcttagctggtcaaagcgcctgtctagtaaacaggagatcctgggttcgaatcccagcggggcct

SEQ ID NO: 528 - DNA, 74 bp, Homo sapiens
  source 1..74: mol_type = genomic DNA
ggctctatggcttagttggttaaagcgcctgtctcgtaaacaggagatcctgggttcgactcccagtggggcct

SEQ ID NO: 529 - DNA, 72 bp, Homo sapiens
  source 1..72: mol_type = genomic DNA
ggcgcggtggccaagtggtaaggcgtcggtctcgtaaaccgaagatcacgggttcgaaccccgtccgtgcct

SEQ ID NO: 530 - DNA, 74 bp, Homo sapiens
  source 1..74: mol_type = genomic DNA
ggctctgtggcttagttggctaaagcgcctgtctcgtaaacaggagatcctgggttcgaatcccagcggggcct

SEQ ID NO: 531 - DNA, 72 bp, Homo sapiens
  source 1..72: mol_type = genomic DNA
ggcgcggtggccaagtggtaaggcgtcggtctcgtaaaccgaagatcgcgggttcgaaccccgtccgtgcct

SEQ ID NO: 532 - DNA, 74 bp, Homo sapiens
  source 1..74: mol_type = genomic DNA
ggccctgtagctcagcggttggagcgctggtctcgtaaacctaggggtcgtgagttcaaatctcaccagggcct

SEQ ID NO: 533 - DNA, 74 bp, Homo sapiens
  source 1..74: mol_type = genomic DNA
ggctctatggcttagttggttaaagcgcctgtcttgtaaacaggagatcctgggttcgaatcccagtagagcct

SEQ ID NO: 534 - DNA, 73 bp, Homo sapiens
  source 1..73: mol_type = genomic DNA
ggctccatagctcagtggttagagcactggtcttgtaaaccaggggtcgcgagttcgatcctcgctggggcct

SEQ ID NO: 535 - DNA, 73 bp, Homo sapiens
  source 1..73: mol_type = genomic DNA
ggctccatagctcaggggttagagcgctggtcttgtaaaccaggggtcgcgagttcaattctcgctggggcct

SEQ ID NO: 536 - DNA, 73 bp, Homo sapiens
  source 1..73: mol_type = genomic DNA
ggctccatagctcaggggttagagcactggtcttgtaaaccaggggtcgcgagttcaaatctcgctggggcct

SEQ ID NO: 537 - DNA, 73 bp, Homo sapiens
  source 1..73: mol_type = genomic DNA
ggccctatagctcaggggttagagcactggtcttgtaaaccaggggtcgcgagttcaaatctcgctggggcct

SEQ ID NO: 538 - DNA, 72 bp, Homo sapiens
  source 1..72: mol_type = genomic DNA
ggctccatagctcaggggttagagcactggtcttgtaaaccagggtcgcgagttcaaatctcgctggggcct

SEQ ID NO: 539 - DNA, 72 bp, Homo sapiens
  source 1..72: mol_type = genomic DNA
ggcctcgtggcgcaacggtagcgcgtctgactccagatcagaaggttgcgtgttcaaatcacgtcggggtca

SEQ ID NO: 540 - DNA, 72 bp, Homo sapiens
  source 1..72: mol_type = genomic DNA
gacctcgtggcgcaatggtagcgcgtctgactccagatcagaaggttgcgtgttcaagtcacgtcggggtca

SEQ ID NO: 541 - DNA, 72 bp, Homo sapiens
  source 1..72: mol_type = genomic DNA
gacctcgtggcgcaacggtagcgcgtctgactccagatcagaaggttgcgtgttcaaatcacgtcggggtca

SEQ ID NO: 542 - DNA, 72 bp, Homo sapiens; identical to SEQ ID NO: 541
  source 1..72: mol_type = genomic DNA

SEQ ID NO: 543 - DNA, 72 bp, Homo sapiens; identical to SEQ ID NO: 541
  source 1..72: mol_type = genomic DNA

SEQ ID NO: 544 - DNA, 72 bp, Homo sapiens
  source 1..72: mol_type = genomic DNA
gacctcgtggcgcaacggtagcgcgtctgactccagatcagaaggctgcgtgttcgaatcacgtcggggtca

SEQ ID NO: 545 - DNA, 72 bp, Homo sapiens
  source 1..72: mol_type = genomic DNA
gacctcgtggcgcaacggcagcgcgtctgactccagatcagaaggttgcgtgttcaaatcacgtcggggtca

SEQ ID NO: 546 - DNA, 93 bp, Homo sapiens
  source 1..93: mol_type = genomic DNA
ccttcaatagttcagctggtagagcagaggactatagctacttcctcagtaggagacgtccttaggttgctggttcgattccagcttgaagga

SEQ ID NO: 547 - DNA, 91 bp, Homo sapiens
  source 1..91: mol_type = genomic DNA
ccttcgatagctcagttggtagagcggaggactgtagttggctgtgtccttagacatccttaggtcgctggttcgaatccggctcgaagga

SEQ ID NO: 548 - DNA, 89 bp, Homo sapiens
  source 1..89: mol_type = genomic DNA
ccttcgatagctcagttggtagagcggaggactgtagtggatagggcgtggcaatccttaggtcgctggttcgattccggctcgaagga

SEQ ID NO: 549 - DNA, 89 bp, Homo sapiens
  source 1..89: mol_type = genomic DNA
ccttcgatagctcagttggtagagcggaggactgtaggctcattaagcaaggtatccttaggtcgctggttcgaatccggctcggagga

SEQ ID NO: 550 - DNA, 94 bp, Homo sapiens
  source 1..94: mol_type = genomic DNA
ccttcgatagctcagctggtagagcggaggactgtagattgtatagacatttgcggacatccttaggtcgctggttcgattccagctcgaagga

SEQ ID NO: 551 - DNA, 93 bp, Homo sapiens
  source 1..93: mol_type = genomic DNA
ccttcgatagctcagctggtagagcggaggactgtagctacttcctcagcaggagacatccttaggtcgctggttcgattccggctcgaagga

SEQ ID NO: 552 - DNA, 89 bp, Homo sapiens
  source 1..89: mol_type = genomic DNA
ccttcgatagctcagctggtagagcggaggactgtaggcgcgcgcccgtggccatccttaggtcgctggttcgattccggctcgaagga

SEQ ID NO: 553 - DNA, 94 bp, Homo sapiens
  source 1..94: mol_type = genomic DNA
ccttcgatagctcagctggtagagcggaggactgtagcctgtagaaacatttgtggacatccttaggtcgctggttcgattccggctcgaagga

SEQ ID NO: 554 - DNA, 94 bp, Homo sapiens
  source 1..94: mol_type = genomic DNA
ccttcgatagctcagctggtagagcggaggactgtagattgtacagacatttgcggacatccttaggtcgctggttcgattccggctcgaagga

SEQ ID NO: 555 - DNA, 89 bp, Homo sapiens
  source 1..89: mol_type = genomic DNA
ccttcgatagctcagctggtagagcggaggactgtagtacttaatgtgtggtcatccttaggtcgctggttcgattccggctcgaagga

SEQ ID NO: 556 - DNA, 89 bp, Homo sapiens
  source 1..89: mol_type = genomic DNA
ccttcgatagctcagctggtagagcggaggactgtaggggtttgaatgtggtcatccttaggtcgctggttcgaatccggctcggagga

SEQ ID NO: 557 - DNA, 94 bp, Homo sapiens
  source 1..94: mol_type = genomic DNA
ccttcgatagctcagctggtagagcggaggactgtagactgcggaaacgtttgtggacatccttaggtcgctggttcaattccggctcgaagga

SEQ ID NO: 558 - DNA, 90 bp, Homo sapiens
  source 1..90: mol_type = genomic DNA
ctttcgatagctcagttggtagagcggaggactgtaggttcattaaactaaggcatccttaggtcgctggttcgaatccggctcgaagga

SEQ ID NO: 559 - DNA, 88 bp, Homo sapiens
  source 1..88: mol_type = genomic DNA
tcttcaatagctcagctggtagagcggaggactgtaggtgcacgcccgtggccattcttaggtgctggtttgattccgacttggagag

SEQ ID NO: 560 - DNA, 73 bp, Homo sapiens
  source 1..73: mol_type = genomic DNA
gtttccgtagtgtagtggttatcacgttcgcctaacacgcgaaaggtccccggttcgaaaccgggcggaaaca

SEQ ID NO: 561 - DNA, 73 bp, Homo sapiens; identical to SEQ ID NO: 560
  source 1..73: mol_type = genomic DNA

SEQ ID NO: 562 - DNA, 73 bp, Homo sapiens; identical to SEQ ID NO: 560
  source 1..73: mol_type = genomic DNA

SEQ ID NO: 563 - DNA, 73 bp, Homo sapiens; identical to SEQ ID NO: 560
  source 1..73: mol_type = genomic DNA

SEQ ID NO: 564 - DNA, 73 bp, Homo sapiens; identical to SEQ ID NO: 560
  source 1..73: mol_type = genomic DNA

SEQ ID NO: 565 - DNA, 73 bp, Homo sapiens
  source 1..73: mol_type = genomic DNA
gtttccgtagtgtagtggtcatcacgttcgcctaacacgcgaaaggtccccggttcgaaaccgggcggaaaca

SEQ ID NO: 566 - DNA, 73 bp, Homo sapiens
  source 1..73: mol_type = genomic DNA
gtttccgtagtgtagtggttatcacgttcgcctaacacgcgaaaggtccctggatcaaaaccaggcggaaaca

SEQ ID NO: 567 - DNA, 73 bp, Homo sapiens
  source 1..73: mol_type = genomic DNA
gtttccgtagtgtagtggttatcacgttcgcctaacacgcgaaaggtccgcggttcgaaaccgggcggaaaca

SEQ ID NO: 568 - DNA, 73 bp, Homo sapiens
  source 1..73: mol_type = genomic DNA
gtttccgtagtgtagtggttatcacgtttgcctaacacgcgaaaggtccccggttcgaaaccgggcagaaaca

SEQ ID NO: 569 - DNA, 72 bp, Homo sapiens
  source 1..72: mol_type = genomic DNA
gggggtgtagctcagtggtagagcgtatgcttaacattcatgaggctctgggttcgatccccagcacttcca

SEQ ID NO: 570 - DNA, 73 bp, Homo sapiens
  source 1..73: mol_type = genomic DNA
gtttccgtagtgtagtggttatcacgttcgcctcacacgcgaaaggtccccggttcgaaaccgggcggaaaca

SEQ ID NO: 571 - DNA, 73 bp, Homo sapiens; identical to SEQ ID NO: 570
  source 1..73: mol_type = genomic DNA

SEQ ID NO: 572 - DNA, 73 bp, Homo sapiens; identical to SEQ ID NO: 570
  source 1..73: mol_type = genomic DNA

SEQ ID NO: 573 - DNA, 73 bp, Homo sapiens; identical to SEQ ID NO: 570
  source 1..73: mol_type = genomic DNA

SEQ ID NO: 574 - DNA, 73 bp, Homo sapiens; identical to SEQ ID NO: 570
  source 1..73: mol_type = genomic DNA

SEQ ID NO: 575 - DNA, 73 bp, Homo sapiens; identical to SEQ ID NO: 570
  source 1..73: mol_type = genomic DNA

SEQ ID NO: 576 - DNA, 73 bp, Homo sapiens; identical to SEQ ID NO: 570
  source 1..73: mol_type = genomic DNA

SEQ ID NO: 577 - DNA, 73 bp, Homo sapiens
  source 1..73: mol_type = genomic DNA
gtttccgtagtgtagtggttatcatgttcgcctcacacgcgaaaggtccccggttcgaaactggatggaaaca

SEQ ID NO: 578 - DNA, 73 bp, Homo sapiens
  source 1..73: mol_type = genomic DNA
gcttctgtagtgtagtggttatcacgttcgcctcacacgcgaaaggtccccggttcgaaaccgggcagaagca

SEQ ID NO: 579 - DNA, 73 bp, Homo sapiens
  source 1..73: mol_type = genomic DNA
gtttccgtagtgtagcggttatcacattcgcctcacacgcgaaaggtccccggttcgatcccgggcggaaaca

SEQ ID NO: 580 - DNA, 73 bp, Homo sapiens
  source 1..73: mol_type = genomic DNA
gtttccgtagtgtagtggttatcacgttcgcctcacacgcgaaaggtccccggttcgaaactgggcggaaaca

SEQ ID NO: 581 - DNA, 73 bp, Homo sapiens; identical to SEQ ID NO: 570
  source 1..73: mol_type = genomic DNA

SEQ ID NO: 582 - DNA, 73 bp, Homo sapiens
  source 1..73: mol_type = genomic DNA
gtttccgtagtggagtggttatcacgttcgcctcacacgcgaaaggtccccggtttgaaaccaggcggaaaca

SEQ ID NO: 583 - DNA, 73 bp, Homo sapiens
  source 1..73: mol_type = genomic DNA
ggttccatagtgtagtggttatcacgtctgctttacacgcagaaggtcctgggttcgagccccagtggaacca

SEQ ID NO: 584 - DNA, 73 bp, Homo sapiens; identical to SEQ ID NO: 583
  source 1..73: mol_type = genomic DNA

SEQ ID NO: 585 - DNA, 73 bp, Homo sapiens
  source 1..73: mol_type = genomic DNA
ggttccatagtgtagcggttatcacgtctgctttacacgcagaaggtcctgggttcgagccccagtggaacca

SEQ ID NO: 586 - DNA, 73 bp, Homo sapiens
  source 1..73: mol_type = genomic DNA
ggttccatagtgtagtggttatcacatctgctttacacgcagaaggtcctgggttcaagccccagtggaacca

SEQ ID NO: 587 - DNA, 73 bp, Homo sapiens
  source 1..73: mol_type = genomic DNA
gtttccgtggtgtagtggttatcacattcgccttacacgcgaaaggtcctcgggtcgaaaccgagcggaaaca

SEQ ID NO: 588 - DNA, 72 bp, Homo sapiens
  source 1..72: mol_type = genomic DNA
agcagagtggcgcagcggaagcgtgctgggcccataacccagaggtcgatggatcgaaaccatcctctgcta

SEQ ID NO: 589 - DNA, 72 bp, Homo sapiens; identical to SEQ ID NO: 588
  source 1..72: mol_type = genomic DNA

SEQ ID NO: 590 - DNA, 72 bp, Homo sapiens; identical to SEQ ID NO: 588
  source 1..72: mol_type = genomic DNA

SEQ ID NO: 591 - DNA, 72 bp, Homo sapiens; identical to SEQ ID NO: 588
  source 1..72: mol_type = genomic DNA

SEQ ID NO: 592 - DNA, 72 bp, Homo sapiens; identical to SEQ ID NO: 588
  source 1..72: mol_type = genomic DNA

SEQ ID NO: 593 - DNA, 72 bp, Homo sapiens; identical to SEQ ID NO: 588
  source 1..72: mol_type = genomic DNA

SEQ ID NO: 594 - DNA, 72 bp, Homo sapiens; identical to SEQ ID NO: 588
  source 1..72: mol_type = genomic DNA

SEQ ID NO: 595 - DNA, 72 bp, Homo sapiens; identical to SEQ ID NO: 588
  source 1..72: mol_type = genomic DNA

SEQ ID NO: 596 - DNA, 72 bp, Homo sapiens
  source 1..72: mol_type = genomic DNA
agcagagtggcgcagcggaagcgtgctgggcccataacccagaggtcgatggatctaaaccatcctctgcta

SEQ ID NO: 597 - DNA, 20 bp, synthetic construct
  source 1..20: mol_type = other DNA
aagtcagacgccttatccat

SEQ ID NO: 598 - DNA, 20 bp, synthetic construct
  source 1..20: mol_type = other DNA
gaagtcagacgccttatcca

SEQ ID NO: 599 - DNA, 20 bp, synthetic construct
  source 1..20: mol_type = other DNA
cgaagtcagacgccttatcc

SEQ ID NO: 600 - DNA, 20 bp, synthetic construct
  source 1..20: mol_type = other DNA
ccgaagtcagacgccttatc

SEQ ID NO: 601 - DNA, 20 bp, synthetic construct
  source 1..20: mol_type = other DNA
tccgaagtcagacgccttat

SEQ ID NO: 602 - DNA, 20 bp, synthetic construct
  source 1..20: mol_type = other DNA
atccgaagtcagacgcctta

SEQ ID NO: 603 - DNA, 20 bp, synthetic construct
  source 1..20: mol_type = other DNA
gatccgaagtcagacgcctt

SEQ ID NO: 604 - DNA, 20 bp, synthetic construct
  source 1..20: mol_type = other DNA
tgatccgaagtcagacgcct

SEQ ID NO: 605 - DNA, 20 bp, synthetic construct
  source 1..20: mol_type = other DNA
ctgatccgaagtcagacgcc

SEQ ID NO: 606 - DNA, 20 bp, synthetic construct
  source 1..20: mol_type = other DNA
tctgatccgaagtcagacgc

SEQ ID NO: 607 - DNA, 20 bp, synthetic construct
  source 1..20: mol_type = other DNA
ttctgatccgaagtcagacg

SEQ ID NO: 608 - DNA, 20 bp, synthetic construct
  source 1..20: mol_type = other DNA
cttctgatccgaagtcagac

SEQ ID NO: 609 - DNA, 20 bp, synthetic construct
  source 1..20: mol_type = other DNA
tcttctgatccgaagtcaga

SEQ ID NO: 610 - DNA, 20 bp, synthetic construct
  source 1..20: mol_type = other DNA
atcttctgatccgaagtcag

SEQ ID NO: 611 - DNA, 20 bp, synthetic construct
  source 1..20: mol_type = other DNA
aatcttctgatccgaagtca

SEQ ID NO: 612 - DNA, 20 bp, synthetic construct
  source 1..20: mol_type = other DNA
caatcttctgatccgaagtc

SEQ ID NO: 613 - DNA, 20 bp, synthetic construct
  source 1..20: mol_type = other DNA
gcaatcttctgatccgaagt

SEQ ID NO: 614 - DNA, 20 bp, synthetic construct
  source 1..20: mol_type = other DNA
tgcaatcttctgatccgaag

SEQ ID NO: 615 - DNA, 20 bp, synthetic construct
  source 1..20: mol_type = other DNA
aagtcagacgccttatccat

SEQ ID NO: 616 - DNA, 20 bp, synthetic construct
  source 1..20: mol_type = other DNA
gaagtcagacgccttatcca

SEQ ID NO: 617 - DNA, 20 bp, synthetic construct
  source 1..20: mol_type = other DNA
cgaagtcagacgccttatcc

SEQ ID NO: 618 - DNA, 20 bp, synthetic construct
  source 1..20: mol_type = other DNA
ccgaagtcagacgccttatc

SEQ ID NO: 619 - DNA, 20 bp, synthetic construct
  source 1..20: mol_type = other DNA
tccgaagtcagacgccttat

SEQ ID NO: 620 - DNA, 20 bp, synthetic construct
  source 1..20: mol_type = other DNA
atccgaagtcagacgcctta

SEQ ID NO: 621 - DNA, 20 bp, synthetic construct
  source 1..20: mol_type = other DNA
gatccgaagtcagacgcctt

SEQ ID NO: 622 - DNA, 20 bp, synthetic construct
  source 1..20: mol_type = other DNA
tgatccgaagtcagacgcct

SEQ ID NO: 623 - DNA, 20 bp, synthetic construct
  source 1..20: mol_type = other DNA
ctgatccgaagtcagacgcc

SEQ ID NO: 624 - DNA, 20 bp, synthetic construct
  source 1..20: mol_type = other DNA
tctgatccgaagtcagacgc

SEQ ID NO: 625 - DNA, 20 bp, synthetic construct
  source 1..20: mol_type = other DNA
ttctgatccgaagtcagacg

SEQ ID NO: 626 - DNA, 20 bp, synthetic construct
  source 1..20: mol_type = other DNA
cttctgatccgaagtcagac

SEQ ID NO: 627 - DNA, 20 bp, synthetic construct
  source 1..20: mol_type = other DNA
tcttctgatccgaagtcaga

SEQ ID NO: 628 - DNA, 20 bp, synthetic construct
  source 1..20: mol_type = other DNA
atcttctgatccgaagtcag

SEQ ID NO: 629 - DNA, 20 bp, synthetic construct
  source 1..20: mol_type = other DNA
aatcttctgatccgaagtca

SEQ ID NO: 630 - DNA, 20 bp, synthetic construct
  source 1..20: mol_type = other DNA
caatcttctgatccgaagtc

SEQ ID NO: 631 - DNA, 20 bp, synthetic construct
  source 1..20: mol_type = other DNA
tcaatcttctgatccgaagt

SEQ ID NO: 632 - DNA, 20 bp, synthetic construct
  source 1..20: mol_type = other DNA
ctcaatcttctgatccgaag

SEQ ID NO: 633 - DNA, 20 bp, synthetic construct
  source 1..20: mol_type = other DNA
aagtcagacgccttatccat

SEQ ID NO: 634 - DNA, 20 bp, synthetic construct
  source 1..20: mol_type = other DNA
gaagtcagacgccttatcca

SEQ ID NO: 635 - DNA, 20 bp, synthetic construct
  source 1..20: mol_type = other DNA
cgaagtcagacgccttatcc

SEQ ID NO: 636 - DNA, 20 bp, synthetic construct
  source 1..20: mol_type = other DNA
ccgaagtcagacgccttatc

SEQ ID NO: 637 - DNA, 20 bp, synthetic construct
  source 1..20: mol_type = other DNA
tccgaagtcagacgccttat

SEQ ID NO: 638 - DNA, 20 bp, synthetic construct
  source 1..20: mol_type = other DNA
atccgaagtcagacgcctta

SEQ ID NO: 639 - DNA, 20 bp, synthetic construct
  source 1..20: mol_type = other DNA
gatccgaagtcagacgcctt

SEQ ID NO: 640 - DNA, 20 bp, synthetic construct
  source 1..20: mol_type = other DNA
tgatccgaagtcagacgcct

SEQ ID NO: 641 - DNA, 20 bp, synthetic construct
  source 1..20: mol_type = other DNA
ctgatccgaagtcagacgcc

SEQ ID NO: 642 - DNA, 20 bp, synthetic construct
  source 1..20: mol_type = other DNA
tctgatccgaagtcagacgc

SEQ ID NO: 643 - DNA, 20 bp, synthetic construct
  source 1..20: mol_type = other DNA
ttctgatccgaagtcagacg

SEQ ID NO: 644 - DNA, 20 bp, synthetic construct
  source 1..20: mol_type = other DNA
cttctgatccgaagtcagac

SEQ ID NO: 645 - DNA, 20 bp, synthetic construct
  source 1..20: mol_type = other DNA
tcttctgatccgaagtcaga

SEQ ID NO: 646 - DNA, 20 bp, synthetic construct
  source 1..20: mol_type = other DNA
atcttctgatccgaagtcag

SEQ ID NO: 647 - DNA, 20 bp, synthetic construct
  source 1..20: mol_type = other DNA
aatcttctgatccgaagtca

SEQ ID NO: 648 - DNA, 20 bp, synthetic construct
  source 1..20: mol_type = other DNA
caatcttctgatccgaagtc

SEQ ID NO: 649 - DNA, 20 bp, synthetic construct
  source 1..20: mol_type = other DNA
tcaatcttctgatccgaagt

SEQ ID NO: 650 - DNA, 20 bp, synthetic construct
  source 1..20: mol_type = other DNA
ctcaatcttctgatccgaag

SEQ ID NO: 651 - DNA, 20 bp, synthetic construct
  source 1..20: mol_type = other DNA
aagtcagacgccttatccat

SEQ ID NO: 652 - DNA, 20 bp, synthetic construct
  source 1..20: mol_type = other DNA
gaagtcagacgccttatcca

SEQ ID NO: 653 - DNA, 20 bp, synthetic construct
  source 1..20: mol_type = other DNA
cgaagtcagacgccttatcc

SEQ ID NO: 654 - DNA, 20 bp, synthetic construct
  source 1..20: mol_type = other DNA
ccgaagtcagacgccttatc

SEQ ID NO: 655 - DNA, 20 bp, synthetic construct
  source 1..20: mol_type = other DNA
tccgaagtcagacgccttat

SEQ ID NO: 656 - DNA, 20 bp, synthetic construct
  source 1..20: mol_type = other DNA
atccgaagtcagacgcctta

SEQ ID NO: 657 - DNA, 20 bp, synthetic construct
  source 1..20: mol_type = other DNA
gatccgaagtcagacgcctt

SEQ ID NO: 658 - DNA, 20 bp, synthetic construct
  source 1..20: mol_type = other DNA
tgatccgaagtcagacgcct

SEQ ID NO: 659 - DNA, 20 bp, synthetic construct
  source 1..20: mol_type = other DNA
ctgatccgaagtcagacgcc

SEQ ID NO: 660 - DNA, 20 bp, synthetic construct
  source 1..20: mol_type = other DNA
tctgatccgaagtcagacgc

SEQ ID NO: 661 - DNA, 20 bp, synthetic construct
  source 1..20: mol_type = other DNA
ttctgatccgaagtcagacg

SEQ ID NO: 662 - DNA, 20 bp, synthetic construct
  source 1..20: mol_type = other DNA
cttctgatccgaagtcagac

SEQ ID NO: 663 - DNA, 20 bp, synthetic construct
  source 1..20: mol_type = other DNA
tcttctgatccgaagtcaga

SEQ ID NO: 664 - DNA, 20 bp, synthetic construct
  source 1..20: mol_type = other DNA
atcttctgatccgaagtcag

SEQ ID NO: 665 - DNA, 20 bp, synthetic construct
  source 1..20: mol_type = other DNA
aatcttctgatccgaagtca

SEQ ID NO: 666 - DNA, 20 bp, synthetic construct
  source 1..20: mol_type = other DNA
caatcttctgatccgaagtc

SEQ ID NO: 667 - DNA, 20 bp, synthetic construct
  source 1..20: mol_type = other DNA
tcaatcttctgatccgaagt

SEQ ID NO: 668 - DNA, 20 bp, synthetic construct
  source 1..20: mol_type = other DNA
ctcaatcttctgatccgaag

SEQ ID NO: 669 - DNA, 20 bp, synthetic construct
  source 1..20: mol_type = other DNA
aagtcagacgccttatccat

SEQ ID NO: 670 - DNA, 20 bp, synthetic construct
  source 1..20: mol_type = other DNA
gaagtcagacgccttatcca

SEQ ID NO: 671 - DNA, 20 bp, synthetic construct
  source 1..20: mol_type = other DNA
cgaagtcagacgccttatcc

SEQ ID NO: 672 - DNA, 20 bp, synthetic construct
  source 1..20: mol_type = other DNA
ccgaagtcagacgccttatc

SEQ ID NO: 673 - DNA, 20 bp, synthetic construct
  source 1..20: mol_type = other DNA
tccgaagtcagacgccttat

SEQ ID NO: 674 - DNA, 20 bp, synthetic construct
  source 1..20: mol_type = other DNA
atccgaagtcagacgcctta

SEQ ID NO: 675 - DNA, 20 bp, synthetic construct
  source 1..20: mol_type = other DNA
gatccgaagtcagacgcctt

SEQ ID NO: 676 - DNA, 20 bp, synthetic construct
  source 1..20: mol_type = other DNA
tgatccgaagtcagacgcct

SEQ ID NO: 677 - DNA, 20 bp, synthetic construct
  source 1..20: mol_type = other DNA
ctgatccgaagtcagacgcc

SEQ ID NO: 678 - DNA, 20 bp, synthetic construct
  source 1..20: mol_type = other DNA
tctgatccgaagtcagacgc

SEQ ID NO: 679 - DNA, 20 bp, synthetic construct
  source 1..20: mol_type = other DNA
ttctgatccgaagtcagacg

SEQ ID NO: 680 - DNA, 20 bp, synthetic construct
  source 1..20: mol_type = other DNA
cttctgatccgaagtcagac

SEQ ID NO: 681 - DNA, 20 bp, synthetic construct
  source 1..20: mol_type = other DNA
tcttctgatccgaagtcaga

SEQ ID NO: 682 - DNA, 20 bp, synthetic construct
  source 1..20: mol_type = other DNA
atcttctgatccgaagtcag

SEQ ID NO: 683 - DNA, 20 bp, synthetic construct
  source 1..20: mol_type = other DNA
aatcttctgatccgaagtca

SEQ ID NO: 684 - DNA, 20 bp, synthetic construct
  source 1..20: mol_type = other DNA
caatcttctgatccgaagtc

SEQ ID NO: 685 - DNA, 20 bp, synthetic construct
  source 1..20: mol_type = other DNA
tcaatcttctgatccgaagt

SEQ ID NO: 686 - DNA, 20 bp, synthetic construct
  source 1..20: mol_type = other DNA
ctcaatcttctgatccgaag

SEQ ID NO: 687 - DNA, 20 bp, synthetic construct
  source 1..20: mol_type = other DNA
aagtcagacgccttatccat

SEQ ID NO: 688 - DNA, 20 bp, synthetic construct
  source 1..20: mol_type = other DNA
gaagtcagacgccttatcca

SEQ ID NO: 689 - DNA, 20 bp, synthetic construct
  source 1..20: mol_type = other DNA
cgaagtcagacgccttatcc

SEQ ID NO: 690 - DNA, 20 bp, synthetic construct
  source 1..20: mol_type = other DNA
ccgaagtcagacgccttatc

SEQ ID NO: 691 - DNA, 20 bp, synthetic construct
  source 1..20: mol_type = other DNA
tccgaagtcagacgccttat

SEQ ID NO: 692 - DNA, 20 bp, synthetic construct
  source 1..20: mol_type = other DNA
atccgaagtcagacgcctta

SEQ ID NO: 693 - DNA, 20 bp, synthetic construct
  source 1..20: mol_type = other DNA
gatccgaagtcagacgcctt

SEQ ID NO: 694 - DNA, 20 bp, synthetic construct
  source 1..20: mol_type = other DNA
tgatccgaagtcagacgcct

SEQ ID NO: 695 - DNA, 20 bp, synthetic construct
  source 1..20: mol_type = other DNA
ttgatccgaagtcagacgcc

SEQ ID NO: 696 - DNA, 20 bp, synthetic construct
  source 1..20: mol_type = other DNA
tttgatccgaagtcagacgc

SEQ ID NO: 697 - DNA, 20 bp, synthetic construct
  source 1..20: mol_type = other DNA
ttttgatccgaagtcagacg

SEQ ID NO: 698 - DNA, 20 bp, synthetic construct
  source 1..20: mol_type = other DNA
cttttgatccgaagtcagac

SEQ ID NO: 699 - DNA, 20 bp, synthetic construct
  source 1..20: mol_type = other DNA
tcttttgatccgaagtcaga

SEQ ID NO: 700 - DNA, 20 bp, synthetic construct
  source 1..20: mol_type = other DNA
atcttttgatccgaagtcag

SEQ ID NO: 701 - DNA, 20 bp, synthetic construct
  source 1..20: mol_type = other DNA
aatcttttgatccgaagtca

SEQ ID NO: 702 - DNA, 20 bp, synthetic construct
  source 1..20: mol_type = other DNA
caatcttttgatccgaagtc

SEQ ID NO: 703 - DNA, 20 bp, synthetic construct
  source 1..20: mol_type = other DNA
gcaatcttttgatccgaagt

SEQ ID NO: 704 - DNA, 20 bp, synthetic construct
  source 1..20: mol_type = other DNA
tgcaatcttttgatccgaag

SEQ ID NO: 705 - DNA, 20 bp, synthetic construct
  source 1..20: mol_type = other DNA
gcagtcaaatgctctaccac

SEQ ID NO: 706 - DNA, 20 bp, synthetic construct
  source 1..20: mol_type = other DNA
tgcagtcaaatgctctacca

SEQ ID NO: 707 - DNA, 20 bp, synthetic construct
  source 1..20: mol_type = other DNA
ctgcagtcaaatgctctacc

SEQ ID NO: 708 - DNA, 20 bp, synthetic construct
  source 1..20: mol_type = other DNA
tctgcagtcaaatgctctac

SEQ ID NO: 709 - DNA, 20 bp, synthetic construct
  source 1..20: mol_type = other DNA
atctgcagtcaaatgctcta

SEQ ID NO: 710 - DNA, 20 bp, synthetic construct
  source 1..20: mol_type = other DNA
gatctgcagtcaaatgctct

SEQ ID NO: 711 - DNA, 20 bp, synthetic construct
  source 1..20: mol_type = other DNA
tgatctgcagtcaaatgctc

SEQ ID NO: 712 - DNA, 20 bp, synthetic construct
  source 1..20: mol_type = other DNA
ttgatctgcagtcaaatgct

SEQ ID NO: 713 - DNA, 20 bp, synthetic construct
  source 1..20: mol_type = other DNA
cttgatctgcagtcaaatgc

SEQ ID NO: 714 - DNA, 20 bp, synthetic construct
  source 1..20: mol_type = other DNA
tcttgatctgcagtcaaatg

SEQ ID NO: 715 - DNA, 20 bp, synthetic construct
  source 1..20: mol_type = other DNA
ctcttgatctgcagtcaaat

SEQ ID NO: 716 - DNA, 20 bp, synthetic construct
  source 1..20: mol_type = other DNA
cctcttgatctgcagtcaaa

SEQ ID NO: 717 - DNA, 20 bp, synthetic construct
  source 1..20: mol_type = other DNA
acctcttgatctgcagtcaa

SEQ ID NO: 718 - DNA, 20 bp, synthetic construct
  source 1..20: mol_type = other DNA
gacctcttgatctgcagtca

SEQ ID NO: 719 - DNA, 20 bp, synthetic construct
  source 1..20: mol_type = other DNA
ggacctcttgatctgcagtc

SEQ ID NO: 720 - DNA, 20 bp, synthetic construct
  source 1..20: mol_type = other DNA
gggacctcttgatctgcagt

SEQ ID NO: 721 - DNA, 20 bp, synthetic construct
  source 1..20: mol_type = other DNA
agggacctcttgatctgcag

SEQ ID NO: 722 - DNA, 20 bp, synthetic construct
  source 1..20: mol_type = other DNA
cagggacctcttgatctgca

SEQ ID NO: 723 - DNA, 20 bp, synthetic construct
  source 1..20: mol_type = other DNA
gcagtcaaatgctctacccc

SEQ ID NO: 724 - DNA, 20 bp, synthetic construct
  source 1..20: mol_type = other DNA
tgcagtcaaatgctctaccc

SEQ ID NO: 725 - DNA, 20 bp, synthetic construct
  source 1..20: mol_type = other DNA
ctgcagtcaaatgctctacc

SEQ ID NO: 726 - DNA, 20 bp, synthetic construct
  source 1..20: mol_type = other DNA
tctgcagtcaaatgctctac

SEQ ID NO: 727 - DNA, 20 bp, synthetic construct
  source 1..20: mol_type = other DNA
atctgcagtcaaatgctcta

SEQ ID NO: 728 - DNA, 20 bp, synthetic construct
  source 1..20: mol_type = other DNA
gatctgcagtcaaatgctct

SEQ ID NO: 729 - DNA, 20 bp, synthetic construct
  source 1..20: mol_type = other DNA
tgatctgcagtcaaatgctc

SEQ ID NO: 730 - DNA, 20 bp, synthetic construct
  source 1..20: mol_type = other DNA
ttgatctgcagtcaaatgct

SEQ ID NO: 731 - DNA, 20 bp, synthetic construct
  source 1..20: mol_type = other DNA
cttgatctgcagtcaaatgc

SEQ ID NO: 732 - DNA, 20 bp, synthetic construct
  source 1..20: mol_type = other DNA
tcttgatctgcagtcaaatg

SEQ ID NO: 733 - DNA, 20 bp, synthetic construct
  source 1..20: mol_type = other DNA
ctcttgatctgcagtcaaat

SEQ ID NO: 734 - DNA, 20 bp, synthetic construct
  source 1..20: mol_type = other DNA
cctcttgatctgcagtcaaa

SEQ ID NO: 735 - DNA, 20 bp, synthetic construct
  source 1..20: mol_type = other DNA
acctcttgatctgcagtcaa

SEQ ID NO: 736 - DNA, 20 bp, synthetic construct
  source 1..20: mol_type = other DNA
gacctcttgatctgcagtca

SEQ ID NO: 737 - DNA, 20 bp, synthetic construct
  source 1..20: mol_type = other DNA
ggacctcttgatctgcagtc

SEQ ID NO: 738 - DNA, 20 bp, synthetic construct
  source 1..20: mol_type = other DNA
gggacctcttgatctgcagt

SEQ ID NO: 739 - DNA, 20 bp, synthetic construct
  source 1..20: mol_type = other DNA
agggacctcttgatctgcag

SEQ ID NO: 740 - DNA, 20 bp, synthetic construct
  source 1..20: mol_type = other DNA
cagggacctcttgatctgca

SEQ ID NO: 741 - DNA, 20 bp, synthetic construct
  source 1..20: mol_type = other DNA
gcagtcaaatgctctaccgc

SEQ ID NO: 742 - DNA, 20 bp, synthetic construct
  source 1..20: mol_type = other DNA
tgcagtcaaatgctctaccg

SEQ ID NO: 743 - DNA, 20 bp, synthetic construct
  source 1..20: mol_type = other DNA
ctgcagtcaaatgctctacc

SEQ ID NO: 744 - DNA, 20 bp, synthetic construct
  source 1..20: mol_type = other DNA
tctgcagtcaaatgctctac

SEQ ID NO: 745 - DNA, 20 bp, synthetic construct
  source 1..20: mol_type = other DNA
atctgcagtcaaatgctcta

SEQ ID NO: 746 - DNA, 20 bp, synthetic construct
  source 1..20: mol_type = other DNA
gatctgcagtcaaatgctct

SEQ ID NO: 747 - DNA, 20 bp, synthetic construct
  source 1..20: mol_type = other DNA
tgatctgcagtcaaatgctc

SEQ ID NO: 748 - DNA, 20 bp, synthetic construct
  source 1..20: mol_type = other DNA
ttgatctgcagtcaaatgct

SEQ ID NO: 749 - DNA, 20 bp, synthetic construct
  source 1..20: mol_type = other DNA
cttgatctgcagtcaaatgc

SEQ ID NO: 750 - DNA, 20 bp, synthetic construct
  source 1..20: mol_type = other DNA
tcttgatctgcagtcaaatg

SEQ ID NO: 751 - DNA, 20 bp, synthetic construct
  source 1..20: mol_type = other DNA
ctcttgatctgcagtcaaat

SEQ ID NO: 752 - DNA, 20 bp, synthetic construct
  source 1..20: mol_type = other DNA
cctcttgatctgcagtcaaa

SEQ ID NO: 753 - DNA, 20 bp, synthetic construct
  source 1..20: mol_type = other DNA
acctcttgatctgcagtcaa

SEQ ID NO: 754 - DNA, 20 bp, synthetic construct
  source 1..20: mol_type = other DNA
gacctcttgatctgcagtca

SEQ ID NO: 755 - DNA, 20 bp, synthetic construct
  source 1..20: mol_type = other DNA
ggacctcttgatctgcagtc

SEQ ID NO: 756 - DNA, 20 bp, synthetic construct
  source 1..20: mol_type = other DNA
gggacctcttgatctgcagt

SEQ ID NO: 757 - DNA, 20 bp, synthetic construct
  source 1..20: mol_type = other DNA
ggggacctcttgatctgcag

SEQ ID NO: 758 - DNA, 20 bp, synthetic construct
  source 1..20: mol_type = other DNA
cggggacctcttgatctgca

SEQ ID NO: 759 - DNA, 20 bp, synthetic construct
  source 1..20: mol_type = other DNA
gcagtcaaatgctctacccc

SEQ ID NO: 760 - DNA, 20 bp, synthetic construct
  source 1..20: mol_type = other DNA
tgcagtcaaatgctctaccc

SEQ ID NO: 761 - DNA, 20 bp, synthetic construct
  source 1..20: mol_type = other DNA
ctgcagtcaaatgctctacc

SEQ ID NO: 762 - DNA, 20 bp, synthetic construct
  source 1..20: mol_type = other DNA
tctgcagtcaaatgctctac

SEQ ID NO: 763 - DNA, 20 bp, synthetic construct
  source 1..20: mol_type = other DNA
atctgcagtcaaatgctcta

SEQ ID NO: 764 - DNA, 20 bp, synthetic construct
  source 1..20: mol_type = other DNA
gatctgcagtcaaatgctct

SEQ ID NO: 765 - DNA, 20 bp, synthetic construct
  source 1..20: mol_type = other DNA
tgatctgcagtcaaatgctc

SEQ ID NO: 766 - DNA, 20 bp, synthetic construct
  source 1..20: mol_type = other DNA
ttgatctgcagtcaaatgct

SEQ ID NO: 767 - DNA, 20 bp, synthetic construct
  source 1..20: mol_type = other DNA
tttgatctgcagtcaaatgc

SEQ ID NO: 768 - DNA, 20 bp, synthetic construct
  source 1..20: mol_type = other DNA
ttttgatctgcagtcaaatg

SEQ ID NO: 769 - DNA, 20 bp, synthetic construct
  source 1..20: mol_type = other DNA
cttttgatctgcagtcaaat

SEQ ID NO: 770 - DNA, 20 bp, synthetic construct
  source 1..20: mol_type = other DNA
ccttttgatctgcagtcaaa

SEQ ID NO: 771 - DNA, 20 bp, synthetic construct
  source 1..20: mol_type = other DNA
accttttgatctgcagtcaa

SEQ ID NO: 772 - DNA, 20 bp, synthetic construct
  source 1..20: mol_type = other DNA
gaccttttgatctgcagtca

SEQ ID NO: 773 - DNA, 20 bp, synthetic construct
  source 1..20: mol_type = other DNA
ggaccttttgatctgcagtc

SEQ ID NO: 774 - DNA, 20 bp, synthetic construct
  source 1..20: mol_type = other DNA
gggaccttttgatctgcagt

SEQ ID NO: 775 - DNA, 20 bp, synthetic construct
  source 1..20: mol_type = other DNA
agggaccttttgatctgcag

SEQ ID NO: 776 - DNA, 20 bp, synthetic construct
  source 1..20: mol_type = other DNA
cagggaccttttgatctgca

SEQ ID NO: 777 - DNA, 20 bp, synthetic construct
  source 1..20: mol_type = other DNA
gcagtcaaatgctctacccc

SEQ ID NO: 778 - DNA, 20 bp, synthetic construct
  source 1..20: mol_type = other DNA
tgcagtcaaatgctctaccc

SEQ ID NO: 779 - DNA, 20 bp, synthetic construct
  source 1..20: mol_type = other DNA
ctgcagtcaaatgctctacc

SEQ ID NO: 780 - DNA, 20 bp, synthetic construct
  source 1..20: mol_type = other DNA
tctgcagtcaaatgctctac

SEQ ID NO: 781 - DNA, 20 bp, synthetic construct
  source 1..20: mol_type = other DNA
atctgcagtcaaatgctcta

SEQ ID NO: 782 - DNA, 20 bp, synthetic construct
  source 1..20: mol_type = other DNA
gatctgcagtcaaatgctct

SEQ ID NO: 783 - DNA, 20 bp, synthetic construct
  source 1..20: mol_type = other DNA
tgatctgcagtcaaatgctc

SEQ ID NO: 784 - DNA, 20 bp, synthetic construct
  source 1..20: mol_type = other DNA
ttgatctgcagtcaaatgct

SEQ ID NO: 785 - DNA, 20 bp, synthetic construct
  source 1..20: mol_type = other DNA
cttgatctgcagtcaaatgc

SEQ ID NO: 786 - DNA, 20 bp, synthetic construct
  source 1..20: mol_type = other DNA
tcttgatctgcagtcaaatg

SEQ ID NO: 787 - DNA, 20 bp, synthetic construct
  source 1..20: mol_type = other DNA
ctcttgatctgcagtcaaat

SEQ ID NO: 788 - DNA, 20 bp, synthetic construct
  source 1..20: mol_type = other DNA
cctcttgatctgcagtcaaa

SEQ ID NO: 789 - DNA, 20 bp, synthetic construct
  source 1..20: mol_type = other DNA
acctcttgatctgcagtcaa

SEQ ID NO: 790 - DNA, 20 bp, synthetic construct
  source 1..20: mol_type = other DNA
gacctcttgatctgcagtca

SEQ ID NO: 791 - DNA, 20 bp, synthetic construct
  source 1..20: mol_type = other DNA
ggacctcttgatctgcagtc

SEQ ID NO: 792 - DNA, 20 bp, synthetic construct
  source 1..20: mol_type = other DNA
gggacctcttgatctgcagt

SEQ ID NO: 793 - DNA, 20 bp, synthetic construct
  source 1..20: mol_type = other DNA
ggggacctcttgatctgcag

SEQ ID NO: 794 - DNA, 20 bp, synthetic construct
  source 1..20: mol_type = other DNA
tggggacctcttgatctgca

SEQ ID NO: 795 - DNA, 20 bp, synthetic construct
  source 1..20: mol_type = other DNA
gcagtcaaatgctctacccc

SEQ ID NO: 796 - DNA, 20 bp, synthetic construct
  source 1..20: mol_type = other DNA
tgcagtcaaatgctctaccc

SEQ ID NO: 797 - DNA, 20 bp, synthetic construct
  source 1..20: mol_type = other DNA
ctgcagtcaaatgctctacc

SEQ ID NO: 798 - DNA, 20 bp, synthetic construct
  source 1..20: mol_type = other DNA
tctgcagtcaaatgctctac

SEQ ID NO: 799 - DNA, 20 bp, synthetic construct
  source 1..20: mol_type = other DNA
atctgcagtcaaatgctcta

SEQ ID NO: 800 - DNA, 20 bp, synthetic construct
  source 1..20: mol_type = other DNA
gatctgcagtcaaatgctct

SEQ ID NO: 801 - DNA, 20 bp, synthetic construct
  source 1..20: mol_type = other DNA
tgatctgcagtcaaatgctc

SEQ ID NO: 802 - DNA, 20 bp, synthetic construct
  source 1..20: mol_type = other DNA
ttgatctgcagtcaaatgct

SEQ ID NO: 803 - DNA, 20 bp, synthetic construct
  source 1..20: mol_type = other DNA
cttgatctgcagtcaaatgc

SEQ ID NO: 804 - DNA, 20 bp, synthetic construct
  source 1..20: mol_type = other DNA
tcttgatctgcagtcaaatg

SEQ ID NO: 805 - DNA, 20 bp, synthetic construct
  source 1..20: mol_type = other DNA
ttcttgatctgcagtcaaat

SEQ ID NO: 806 - DNA, 20 bp, synthetic construct
  source 1..20: mol_type = other DNA
cttcttgatctgcagtcaaa

SEQ ID NO: 807 - DNA, 20 bp, synthetic construct
  source 1..20: mol_type = other DNA
acttcttgatctgcagtcaa

SEQ ID NO: 808 - DNA, 20 bp, synthetic construct
  source 1..20: mol_type = other DNA
gacttcttgatctgcagtca

SEQ ID NO: 809 - DNA, 20 bp, synthetic construct
  source 1..20: mol_type = other DNA
ggacttcttgatctgcagtc

SEQ ID NO: 810 - DNA, 20 bp, synthetic construct
  source 1..20: mol_type = other DNA
gggacttcttgatctgcagt

SEQ ID NO: 811 - DNA, 20 bp, synthetic construct
  source 1..20: mol_type = other DNA
ggggacttcttgatctgcag

SEQ ID NO: 812 - DNA, 20 bp, synthetic construct
  source 1..20: mol_type = other DNA
cggggacttcttgatctgca

SEQ ID NO: 813 - DNA, 20 bp, synthetic construct
  source 1..20: mol_type = other DNA
gcagtcaaatgctctacccc

SEQ ID NO: 814 - DNA, 20 bp, synthetic construct
  source 1..20: mol_type = other DNA
tgcagtcaaatgctctaccc

SEQ ID NO: 815 - DNA, 20 bp, synthetic construct
  source 1..20: mol_type = other DNA
ctgcagtcaaatgctctacc

SEQ ID NO: 816 - DNA, 20 bp, synthetic construct
  source 1..20: mol_type = other DNA
tctgcagtcaaatgctctac

SEQ ID NO: 817 - DNA, 20 bp, synthetic construct
  source 1..20: mol_type = other DNA
atctgcagtcaaatgctcta

SEQ ID NO: 818 - DNA, 20 bp, synthetic construct
  source 1..20: mol_type = other DNA
gatctgcagtcaaatgctct

SEQ ID NO: 819 - DNA, 20 bp, synthetic construct
  source 1..20: mol_type = other DNA
tgatctgcagtcaaatgctc

SEQ ID NO: 820 - DNA, 20 bp, synthetic construct
  source 1..20: mol_type = other DNA
ttgatctgcagtcaaatgct

SEQ ID NO: 821 - DNA, 20 bp, synthetic construct
  source 1..20: mol_type = other DNA
cttgatctgcagtcaaatgc

SEQ ID NO: 822 - DNA, 20 bp, synthetic construct
  source 1..20: mol_type = other DNA
tcttgatctgcagtcaaatg

SEQ ID NO: 823 - DNA, 20 bp, synthetic construct
  source 1..20: mol_type = other DNA
ctcttgatctgcagtcaaat

SEQ ID NO: 824 - DNA, 20 bp, synthetic construct
  source 1..20: mol_type = other DNA
cctcttgatctgcagtcaaa

SEQ ID NO: 825 - DNA, 20 bp, synthetic construct
  source 1..20: mol_type = other DNA
acctcttgatctgcagtcaa

SEQ ID NO: 826 - DNA, 20 bp, synthetic construct
  source 1..20: mol_type = other DNA
gacctcttgatctgcagtca

SEQ ID NO: 827 - DNA, 20 bp, synthetic construct
  source 1..20: mol_type = other DNA
agacctcttgatctgcagtc

SEQ ID NO: 828 - DNA, 20 bp, synthetic construct
  source 1..20: mol_type = other DNA
gagacctcttgatctgcagt

SEQ ID NO: 829 - DNA, 20 bp, synthetic construct
  source 1..20: mol_type = other DNA
agagacctcttgatctgcag

SEQ ID NO: 830 - DNA, 20 bp, synthetic construct
  source 1..20: mol_type = other DNA
cagagacctcttgatctgca

SEQ ID NO: 831 - DNA, 20 bp, synthetic construct
  source 1..20: mol_type = other DNA
gcagtcaagtgctctacccc

SEQ ID NO: 832 - DNA, 20 bp, synthetic construct
  source 1..20: mol_type = other DNA
tgcagtcaagtgctctaccc

SEQ ID NO: 833 - DNA, 20 bp, synthetic construct
  source 1..20: mol_type = other DNA
ctgcagtcaagtgctctacc

SEQ ID NO: 834 - DNA, 20 bp, synthetic construct
  source 1..20: mol_type = other DNA
tctgcagtcaagtgctctac

SEQ ID NO: 835 - DNA, 20 bp, synthetic construct
  source 1..20: mol_type = other DNA
atctgcagtcaagtgctcta

SEQ ID NO: 836 - DNA, 20 bp, synthetic construct
  source 1..20: mol_type = other DNA
gatctgcagtcaagtgctct

SEQ ID NO: 837 - DNA, 20 bp, synthetic construct
  source 1..20: mol_type = other DNA
tgatctgcagtcaagtgctc

SEQ ID NO: 838 - DNA, 20 bp, synthetic construct
  source 1..20: mol_type = other DNA
ttgatctgcagtcaagtgct

SEQ ID NO: 839 - DNA, 20 bp, synthetic construct
  source 1..20: mol_type = other DNA
cttgatctgcagtcaagtgc

SEQ ID NO: 840 - DNA, 20 bp, synthetic construct
  source 1..20: mol_type = other DNA
tcttgatctgcagtcaagtg

SEQ ID NO: 841 - DNA, 20 bp, synthetic construct
  source 1..20: mol_type = other DNA
ttcttgatctgcagtcaagt

SEQ ID NO: 842 - DNA, 20 bp, synthetic construct
  source 1..20: mol_type = other DNA
cttcttgatctgcagtcaag

SEQ ID NO: 843 - DNA, 20 bp, synthetic construct
  source 1..20: mol_type = other DNA
acttcttgatctgcagtcaa

SEQ ID NO: 844 - DNA, 20 bp, synthetic construct
  source 1..20: mol_type = other DNA
gacttcttgatctgcagtca

SEQ ID NO: 845 - DNA, 20 bp, synthetic construct
  source 1..20: mol_type = other DNA
ggacttcttgatctgcagtc

SEQ ID NO: 846 - DNA, 20 bp, synthetic construct
  source 1..20: mol_type = other DNA
aggacttcttgatctgcagt

SEQ ID NO: 847 - DNA, 20 bp, synthetic construct
  source 1..20: mol_type = other DNA
aaggacttcttgatctgcag

SEQ ID NO: 848 - DNA, 20 bp, synthetic construct
  source 1..20: mol_type = other DNA
caaggacttcttgatctgca

SEQ ID NO: 849 - DNA, 20 bp, synthetic construct
  source 1..20: mol_type = other DNA
gcagtcaaatgctctacccc

SEQ ID NO: 850 - DNA, 20 bp, synthetic construct
  source 1..20: mol_type = other DNA
tgcagtcaaatgctctaccc

SEQ ID NO: 851 - DNA, 20 bp, synthetic construct
  source 1..20: mol_type = other DNA
ctgcagtcaaatgctctacc

SEQ ID NO: 852 - DNA, 20 bp, synthetic construct
  source 1..20: mol_type = other DNA
tctgcagtcaaatgctctac

SEQ ID NO: 853 - DNA, 20 bp, synthetic construct
  source 1..20: mol_type = other DNA
atctgcagtcaaatgctcta

SEQ ID NO: 854 - DNA, 20 bp, synthetic construct
  source 1..20: mol_type = other DNA
gatctgcagtcaaatgctct

SEQ ID NO: 855 - DNA, 20 bp, synthetic construct
  source 1..20: mol_type = other DNA
tgatctgcagtcaaatgctc

SEQ ID NO: 856 - DNA, 20 bp, synthetic construct
  source 1..20: mol_type = other DNA
ttgatctgcagtcaaatgct

SEQ ID NO: 857 - DNA, 20 bp, synthetic construct
  source 1..20: mol_type = other DNA
cttgatctgcagtcaaatgc

SEQ ID NO: 858 - DNA, 20 bp, synthetic construct
  source 1..20: mol_type = other DNA
tcttgatctgcagtcaaatg

SEQ ID NO: 859 - DNA, 20 bp, synthetic construct
  source 1..20: mol_type = other DNA
ctcttgatctgcagtcaaat

SEQ ID NO: 860 - DNA, 20 bp, synthetic construct
  source 1..20: mol_type = other DNA
cctcttgatctgcagtcaaa

SEQ ID NO: 861 - DNA, 20 bp, synthetic construct
  source 1..20: mol_type = other DNA
acctcttgatctgcagtcaa

SEQ ID NO: 862 - DNA, 20 bp, synthetic construct
  source 1..20: mol_type = other DNA
gacctcttgatctgcagtca

SEQ ID NO: 863 - DNA, 20 bp, synthetic construct
  source 1..20: mol_type = other DNA
ggacctcttgatctgcagtc

SEQ ID NO: 864 - DNA, 20 bp, synthetic construct
  source 1..20: mol_type = other DNA
gggacctcttgatctgcagt

SEQ ID NO: 865 - DNA, 20 bp, synthetic construct
  source 1..20: mol_type = other DNA
ggggacctcttgatctgcag

SEQ ID NO: 866 - DNA, 20 bp, synthetic construct
  source 1..20: mol_type = other DNA
cggggacctcttgatctgca

SEQ ID NO: 867 - DNA, 20 bp, synthetic construct
  source 1..20: mol_type = other DNA
gcagtcaaatgctctacccc

SEQ ID NO: 868 - DNA, 20 bp, synthetic construct
  source 1..20: mol_type = other DNA
tgcagtcaaatgctctaccc

SEQ ID NO: 869 - DNA, 20 bp, synthetic construct
  source 1..20: mol_type = other DNA
ctgcagtcaaatgctctacc

SEQ ID NO: 870 - DNA, 20 bp, synthetic construct
  source 1..20: mol_type = other DNA
tctgcagtcaaatgctctac

SEQ ID NO: 871 - DNA, 20 bp, synthetic construct
  source 1..20: mol_type = other DNA
atctgcagtcaaatgctcta

SEQ ID NO: 872 - DNA, 20 bp, synthetic construct
  source 1..20: mol_type = other DNA
gatctgcagtcaaatgctct

SEQ ID NO: 873 - DNA, 20 bp, synthetic construct
  source 1..20: mol_type = other DNA
tgatctgcagtcaaatgctc

SEQ ID NO: 874 - DNA, 20 bp, synthetic construct
  source 1..20: mol_type = other DNA
ttgatctgcagtcaaatgct

SEQ ID NO: 875 - DNA, 20 bp, synthetic construct
  source 1..20: mol_type = other DNA
cttgatctgcagtcaaatgc

SEQ ID NO: 876 - DNA, 20 bp, synthetic construct
  source 1..20: mol_type = other DNA
tcttgatctgcagtcaaatg

SEQ ID NO: 877 - DNA, 20 bp, synthetic construct
  source 1..20: mol_type = other DNA
ctcttgatctgcagtcaaat

SEQ ID NO: 878 - DNA, 20 bp, synthetic construct
  source 1..20: mol_type = other DNA
cctcttgatctgcagtcaaa

SEQ ID NO: 879 - DNA, 20 bp, synthetic construct
  source 1..20: mol_type = other DNA
acctcttgatctgcagtcaa

SEQ ID NO: 880 - DNA, 20 bp, synthetic construct
  source 1..20: mol_type = other DNA
gacctcttgatctgcagtca

SEQ ID NO: 881 - DNA, 20 bp, synthetic construct
  source 1..20: mol_type = other DNA
ggacctcttgatctgcagtc

SEQ ID NO: 882 - DNA, 20 bp, synthetic construct
  source 1..20: mol_type = other DNA
gggacctcttgatctgcagt

SEQ ID NO: 883 - DNA, 20 bp, synthetic construct
  source 1..20: mol_type = other DNA
agggacctcttgatctgcag

SEQ ID NO: 884 - DNA, 20 bp, synthetic construct
  source 1..20: mol_type = other DNA
cagggacctcttgatctgca

SEQ ID NO: 885 - DNA, 20 bp, synthetic construct
  source 1..20: mol_type = other DNA
gcagtcaaatgctctacccc

SEQ ID NO: 886 - DNA, 20 bp, synthetic construct
  source 1..20: mol_type = other DNA
tgcagtcaaatgctctaccc

SEQ ID NO: 887 - DNA, 20 bp, synthetic construct
  source 1..20: mol_type = other DNA
ttgcagtcaaatgctctacc

SEQ ID NO: 888 - DNA, 20 bp, synthetic construct
  source 1..20: mol_type = other DNA
tttgcagtcaaatgctctac

SEQ ID NO: 889 - DNA, 20 bp, synthetic construct
  source 1..20: mol_type = other DNA
atttgcagtcaaatgctcta

SEQ ID NO: 890 - DNA, 20 bp, synthetic construct
  source 1..20: mol_type = other DNA
gatttgcagtcaaatgctct

SEQ ID NO: 891 - DNA, 20 bp, synthetic construct
  source 1..20: mol_type = other DNA
tgatttgcagtcaaatgctc

SEQ ID NO: 892 - DNA, 20 bp, synthetic construct
  source 1..20: mol_type = other DNA
ttgatttgcagtcaaatgct

SEQ ID NO: 893 - DNA, 20 bp, synthetic construct
  source 1..20: mol_type = other DNA
cttgatttgcagtcaaatgc

SEQ ID NO: 894 - DNA, 20 bp, synthetic construct
  source 1..20: mol_type = other DNA
tcttgatttgcagtcaaatg

SEQ ID NO: 895 - DNA, 20 bp, synthetic construct
  source 1..20: mol_type = other DNA
ctcttgatttgcagtcaaat

SEQ ID NO: 896 - DNA, 20 bp, synthetic construct
  source 1..20: mol_type = other DNA
cctcttgatttgcagtcaaa

SEQ ID NO: 897 - DNA, 20 bp, synthetic construct
  source 1..20: mol_type = other DNA
acctcttgatttgcagtcaa

SEQ ID NO: 898 - DNA, 20 bp, synthetic construct
  source 1..20: mol_type = other DNA
gacctcttgatttgcagtca

SEQ ID NO: 899 - DNA, 20 bp, synthetic construct
  source 1..20: mol_type = other DNA
ggacctcttgatttgcagtc

SEQ ID NO: 900 - DNA, 20 bp, synthetic construct
  source 1..20: mol_type = other DNA
gggacctcttgatttgcagt

SEQ ID NO: 901 - DNA, 20 bp, synthetic construct
  source 1..20: mol_type = other DNA
agggacctcttgatttgcag

SEQ ID NO: 902 - DNA, 20 bp, synthetic construct
  source 1..20: mol_type = other DNA
cagggacctcttgatttgca

SEQ ID NO: 903 - DNA, 20 bp, synthetic construct
  source 1..20: mol_type = other DNA
gcagtcaaatgctctaccac

SEQ ID NO: 904 - DNA, 20 bp, synthetic construct
  source 1..20: mol_type = other DNA
tgcagtcaaatgctctacca

SEQ ID NO: 905 - DNA, 20 bp, synthetic construct
  source 1..20: mol_type = other DNA
ctgcagtcaaatgctctacc

SEQ ID NO: 906 - DNA, 20 bp, synthetic construct
  source 1..20: mol_type = other DNA
tctgcagtcaaatgctctac

SEQ ID NO: 907 - DNA, 20 bp, synthetic construct
  source 1..20: mol_type = other DNA
atctgcagtcaaatgctcta

SEQ ID NO: 908 - DNA, 20 bp, synthetic construct
  source 1..20: mol_type = other DNA
gatctgcagtcaaatgctct

SEQ ID NO: 909 - DNA, 20 bp, synthetic construct
  source 1..20: mol_type = other DNA
tgatctgcagtcaaatgctc

SEQ ID NO: 910 - DNA, 20 bp, synthetic construct
  source 1..20: mol_type = other DNA
ttgatctgcagtcaaatgct

SEQ ID NO: 911 - DNA, 20 bp, synthetic construct
  source 1..20: mol_type = other DNA
cttgatctgcagtcaaatgc

SEQ ID NO: 912 - DNA, 20 bp, synthetic construct
  source 1..20: mol_type = other DNA
tcttgatctgcagtcaaatg

SEQ ID NO: 913 - DNA, 20 bp, synthetic construct
  source 1..20: mol_type = other DNA
ctcttgatctgcagtcaaat

SEQ ID NO: 914 - DNA, 20 bp, synthetic construct
  source 1..20: mol_type = other DNA
cctcttgatctgcagtcaaa

SEQ ID NO: 915 - DNA, 20 bp, synthetic construct
  source 1..20: mol_type = other DNA
acctcttgatctgcagtcaa

SEQ ID NO: 916 - DNA, 20 bp, synthetic construct
  source 1..20: mol_type = other DNA
gacctcttgatctgcagtca

SEQ ID NO: 917 - DNA, 20 bp, synthetic construct
  source 1..20: mol_type = other DNA
ggacctcttgatctgcagtc

SEQ ID NO: 918 - DNA, 20 bp, synthetic construct
  source 1..20: mol_type = other DNA
gggacctcttgatctgcagt

SEQ ID NO: 919 - DNA, 20 bp, synthetic construct
  source 1..20: mol_type = other DNA
ggggacctcttgatctgcag

SEQ ID NO: 920 - DNA, 20 bp, synthetic construct
  source 1..20: mol_type = other DNA
cggggacctcttgatctgca

SEQ ID NO: 921 - DNA, 20 bp, synthetic construct
  source 1..20: mol_type = other DNA
gcagtcaaatgctctaccac

SEQ ID NO: 922 - DNA, 20 bp, synthetic construct
  source 1..20: mol_type = other DNA
tgcagtcaaatgctctacca

SEQ ID NO: 923 - DNA, 20 bp, synthetic construct
  source 1..20: mol_type = other DNA
ctgcagtcaaatgctctacc

SEQ ID NO: 924 - DNA, 20 bp, synthetic construct
  source 1..20: mol_type = other DNA
tctgcagtcaaatgctctac

SEQ ID NO: 925 - DNA, 20 bp, synthetic construct
  source 1..20: mol_type = other DNA
atctgcagtcaaatgctcta

SEQ ID NO: 926 - DNA, 20 bp, synthetic construct
  source 1..20: mol_type = other DNA
gatctgcagtcaaatgctct

SEQ ID NO: 927 - DNA, 20 bp, synthetic construct
  source 1..20: mol_type = other DNA
tgatctgcagtcaaatgctc

SEQ ID NO: 928 - DNA, 20 bp, synthetic construct
  source 1..20: mol_type = other DNA
ttgatctgcagtcaaatgct

SEQ ID NO: 929 - DNA, 20 bp, synthetic construct
  source 1..20: mol_type = other DNA
cttgatctgcagtcaaatgc

SEQ ID NO: 930 - DNA, 20 bp, synthetic construct
  source 1..20: mol_type = other DNA
tcttgatctgcagtcaaatg

SEQ ID NO: 931 - DNA, 20 bp, synthetic construct
  source 1..20: mol_type = other DNA
ctcttgatctgcagtcaaat

SEQ ID NO: 932 - DNA, 20 bp, synthetic construct
  source 1..20: mol_type = other DNA
cctcttgatctgcagtcaaa

SEQ ID NO: 933 - DNA, 20 bp, synthetic construct
  source 1..20: mol_type = other DNA
acctcttgatctgcagtcaa

SEQ ID NO: 934 - DNA, 20 bp, synthetic construct
  source 1..20: mol_type = other DNA
gacctcttgatctgcagtca

SEQ ID NO: 935 - DNA, 20 bp, synthetic construct
  source 1..20: mol_type = other DNA
ggacctcttgatctgcagtc

SEQ ID NO: 936 - DNA, 20 bp, synthetic construct
  source 1..20: mol_type = other DNA
gggacctcttgatctgcagt

SEQ ID NO: 937 - DNA, 20 bp, synthetic construct
  source 1..20: mol_type = other DNA
ggggacctcttgatctgcag

SEQ ID NO: 938 - DNA, 20 bp, synthetic construct
  source 1..20: mol_type = other DNA
cggggacctcttgatctgca

SEQ ID NO: 939 - DNA, 20 bp, synthetic construct
  source 1..20: mol_type = other DNA
gcagtcaaatgctctaccac

SEQ ID NO: 940 - DNA, 20 bp, synthetic construct
  source 1..20: mol_type = other DNA
tgcagtcaaatgctctacca

SEQ ID NO: 941 - DNA, 20 bp, synthetic construct
  source 1..20: mol_type = other DNA
ctgcagtcaaatgctctacc

SEQ ID NO: 942 - DNA, 20 bp, synthetic construct
  source 1..20: mol_type = other DNA
tctgcagtcaaatgctctac

SEQ ID NO: 943 - DNA, 20 bp, synthetic construct
  source 1..20: mol_type = other DNA
atctgcagtcaaatgctcta

SEQ ID NO: 944 - DNA, 20 bp, synthetic construct
  source 1..20: mol_type = other DNA
gatctgcagtcaaatgctct

SEQ ID NO: 945 - DNA, 20 bp, synthetic construct
  source 1..20: mol_type = other DNA
tgatctgcagtcaaatgctc

SEQ ID NO: 946 - DNA, 20 bp, synthetic construct
  source 1..20: mol_type = other DNA
ttgatctgcagtcaaatgct

SEQ ID NO: 947 - DNA, 20 bp, synthetic construct
  source 1..20: mol_type = other DNA
cttgatctgcagtcaaatgc

SEQ ID NO: 948 - DNA, 20 bp, synthetic construct
  source 1..20: mol_type = other DNA
tcttgatctgcagtcaaatg

SEQ ID NO: 949 - DNA, 20 bp, synthetic construct
  source 1..20: mol_type = other DNA
ctcttgatctgcagtcaaat

SEQ ID NO: 950 - DNA, 20 bp, synthetic construct
  source 1..20: mol_type = other DNA
cctcttgatctgcagtcaaa

SEQ ID NO: 951 - DNA, 20 bp, synthetic construct
  source 1..20: mol_type = other DNA
acctcttgatctgcagtcaa

SEQ ID NO: 952 - DNA, 20 bp, synthetic construct
  source 1..20: mol_type = other DNA
gacctcttgatctgcagtca

SEQ ID NO: 953 - DNA, 20 bp, synthetic construct
  source 1..20: mol_type = other DNA
ggacctcttgatctgcagtc

SEQ ID NO: 954 - DNA, 20 bp, synthetic construct
  source 1..20: mol_type = other DNA
gggacctcttgatctgcagt

SEQ ID NO: 955 - DNA, 20 bp, synthetic construct
  source 1..20: mol_type = other DNA
ggggacctcttgatctgcag

SEQ ID NO: 956 - DNA, 20 bp, synthetic construct
  source 1..20: mol_type = other DNA
cggggacctcttgatctgca

SEQ ID NO: 957 - DNA, 20 bp, synthetic construct
  source 1..20: mol_type = other DNA
gcagtcaaatgctctaccac

SEQ ID NO: 958 - DNA, 20 bp, synthetic construct
  source 1..20: mol_type = other DNA
tgcagtcaaatgctctacca

SEQ ID NO: 959 - DNA, 20 bp, synthetic construct
  source 1..20: mol_type = other DNA
ctgcagtcaaatgctctacc

SEQ ID NO: 960 - DNA, 20 bp, synthetic construct
  source 1..20: mol_type = other DNA
tctgcagtcaaatgctctac

SEQ ID NO: 961 - DNA, 20 bp, synthetic construct
  source 1..20: mol_type = other DNA
atctgcagtcaaatgctcta

SEQ ID NO: 962 - DNA, 20 bp, synthetic construct
  source 1..20: mol_type = other DNA
gatctgcagtcaaatgctct

SEQ ID NO: 963 - DNA, 20 bp, synthetic construct
  source 1..20: mol_type = other DNA
tgatctgcagtcaaatgctc

SEQ ID NO: 964 - DNA, 20 bp, synthetic construct
  source 1..20: mol_type = other DNA
ttgatctgcagtcaaatgct

SEQ ID NO: 965 - DNA, 20 bp, synthetic construct
  source 1..20: mol_type = other DNA
cttgatctgcagtcaaatgc

SEQ ID NO: 966 - DNA, 20 bp, synthetic construct
  source 1..20: mol_type = other DNA
tcttgatctgcagtcaaatg

SEQ ID NO: 967 - DNA, 20 bp, synthetic construct
  source 1..20: mol_type = other DNA
ctcttgatctgcagtcaaat

SEQ ID NO: 968 - DNA, 20 bp, synthetic construct
  source 1..20: mol_type = other DNA
cctcttgatctgcagtcaaa

SEQ ID NO: 969 - DNA, 20 bp, synthetic construct
  source 1..20: mol_type = other DNA
acctcttgatctgcagtcaa

SEQ ID NO: 970 - DNA, 20 bp, synthetic construct
  source 1..20: mol_type = other DNA
gacctcttgatctgcagtca

SEQ ID NO: 971 - DNA, 20 bp, synthetic construct
  source 1..20: mol_type = other DNA
ggacctcttgatctgcagtc

SEQ ID NO: 972 - DNA, 20 bp, synthetic construct
  source 1..20: mol_type = other DNA
gggacctcttgatctgcagt

SEQ ID NO: 973 - DNA, 20 bp, synthetic construct
  source 1..20: mol_type = other DNA
ggggacctcttgatctgcag

SEQ ID NO: 974 - DNA, 20 bp, synthetic construct
  source 1..20: mol_type = other DNA
cggggacctcttgatctgca

SEQ ID NO: 975 - DNA, 20 bp, synthetic construct
  source 1..20: mol_type = other DNA
gcagtcaaatgctctacccc

SEQ ID NO: 976 - DNA, 20 bp, synthetic construct
  source 1..20: mol_type = other DNA
tgcagtcaaatgctctaccc

SEQ ID NO: 977 - DNA, 20 bp, synthetic construct
  source 1..20: mol_type = other DNA
ctgcagtcaaatgctctacc

SEQ ID NO: 978 - DNA, 20 bp, synthetic construct
  source 1..20: mol_type = other DNA
tctgcagtcaaatgctctac

SEQ ID NO: 979 - DNA, 20 bp, synthetic construct
  source 1..20: mol_type = other DNA
atctgcagtcaaatgctcta

SEQ ID NO: 980 - DNA, 20 bp, synthetic construct
  source 1..20: mol_type = other DNA
gatctgcagtcaaatgctct

SEQ ID NO: 981 - DNA, 20 bp, synthetic construct
  source 1..20: mol_type = other DNA
tgatctgcagtcaaatgctc

SEQ ID NO: 982 - DNA, 20 bp, synthetic construct
  source 1..20: mol_type = other DNA
ttgatctgcagtcaaatgct

SEQ ID NO: 983 - DNA, 20 bp, synthetic construct
  source 1..20: mol_type = other DNA
cttgatctgcagtcaaatgc

SEQ ID NO: 984 - DNA, 20 bp, synthetic construct
  source 1..20: mol_type = other DNA
tcttgatctgcagtcaaatg

SEQ ID NO: 985 - DNA, 20 bp, synthetic construct
  source 1..20: mol_type = other DNA
ctcttgatctgcagtcaaat

SEQ ID NO: 986 - DNA, 20 bp, synthetic construct
  source 1..20: mol_type = other DNA
cctcttgatctgcagtcaaa

SEQ ID NO: 987 - DNA, 20 bp, synthetic construct
  source 1..20: mol_type = other DNA
acctcttgatctgcagtcaa

SEQ ID NO: 988 - DNA, 20 bp, synthetic construct
  source 1..20: mol_type = other DNA
gacctcttgatctgcagtca

SEQ ID NO: 989 - DNA, 20 bp, synthetic construct
  source 1..20: mol_type = other DNA
ggacctcttgatctgcagtc

SEQ ID NO: 990 - DNA, 20 bp, synthetic construct
  source 1..20: mol_type = other DNA
gggacctcttgatctgcagt

SEQ ID NO: 991 - DNA, 20 bp, synthetic construct
  source 1..20: mol_type = other DNA
ggggacctcttgatctgcag

SEQ ID NO: 992 - DNA, 20 bp, synthetic construct
  source 1..20: mol_type = other DNA
tggggacctcttgatctgca

SEQ ID NO: 993 - DNA, 20 bp, synthetic construct
  source 1..20: mol_type = other DNA
gcagtcaaatgctctacctg

SEQ ID NO: 994 - DNA, 20 bp, synthetic construct
  source 1..20: mol_type = other DNA
tgcagtcaaatgctctacct

SEQ ID NO: 995 - DNA, 20 bp, synthetic construct
  source 1..20: mol_type = other DNA
ctgcagtcaaatgctctacc

SEQ ID NO: 996 - DNA, 20 bp, synthetic construct
  source 1..20: mol_type = other DNA
tctgcagtcaaatgctctac

SEQ ID NO: 997 - DNA, 20 bp, synthetic construct
  source 1..20: mol_type = other DNA
atctgcagtcaaatgctcta

SEQ ID NO: 998 - DNA, 20 bp, synthetic construct
  source 1..20: mol_type = other DNA
gatctgcagtcaaatgctct

SEQ ID NO: 999 - DNA, 20 bp, synthetic construct
  source 1..20: mol_type = other DNA
tgatctgcagtcaaatgctc

SEQ ID NO: 1000 - DNA, 20 bp, synthetic construct
  source 1..20: mol_type = other DNA
ttgatctgcagtcaaatgct

SEQ ID NO: 1001 - DNA, 20 bp, synthetic construct
  source 1..20: mol_type = other DNA
cttgatctgcagtcaaatgc

SEQ ID NO: 1002 - DNA, 20 bp, synthetic construct
  source 1..20: mol_type = other DNA
tcttgatctgcagtcaaatg

SEQ ID NO: 1003 - DNA, 20 bp, synthetic construct
  source 1..20: mol_type = other DNA
ctcttgatctgcagtcaaat

SEQ ID NO: 1004 - DNA, 20 bp, synthetic construct
  source 1..20: mol_type = other DNA
cctcttgatctgcagtcaaa

SEQ ID NO: 1005 - DNA, 20 bp, synthetic construct
  source 1..20: mol_type = other DNA
acctcttgatctgcagtcaa

SEQ ID NO: 1006 - DNA, 20 bp, synthetic construct
  source 1..20: mol_type = other DNA
gacctcttgatctgcagtca

SEQ ID NO: 1007 - DNA, 20 bp, synthetic construct
  source 1..20: mol_type = other DNA
ggacctcttgatctgcagtc

SEQ ID NO: 1008 - DNA, 20 bp, synthetic construct
  source 1..20: mol_type = other DNA
gggacctcttgatctgcagt

SEQ ID NO: 1009 - DNA, 20 bp, synthetic construct
  source 1..20: mol_type = other DNA
ggggacctcttgatctgcag

SEQ ID NO: 1010 - DNA, 20 bp, synthetic construct
  source 1..20: mol_type = other DNA
cggggacctcttgatctgca

SEQ ID NO: 1011 - DNA, 20 bp, synthetic construct
  source 1..20: mol_type = other DNA
gcagtcaaatgctctacccc

SEQ ID NO: 1012 - DNA, 20 bp, synthetic construct
  source 1..20: mol_type = other DNA
tgcagtcaaatgctctaccc

SEQ ID NO: 1013 - DNA, 20 bp, synthetic construct
  source 1..20: mol_type = other DNA
ctgcagtcaaatgctctacc

SEQ ID NO: 1014 - DNA, 20 bp, synthetic construct
  source 1..20: mol_type = other DNA
tctgcagtcaaatgctctac

SEQ ID NO: 1015 - DNA, 20 bp, synthetic construct
  source 1..20: mol_type = other DNA
atctgcagtcaaatgctcta

SEQ ID NO: 1016 - DNA, 20 bp, synthetic construct
  source 1..20: mol_type = other DNA
gatctgcagtcaaatgctct

SEQ ID NO: 1017 - DNA, 20 bp, synthetic construct
  source 1..20: mol_type = other DNA
tgatctgcagtcaaatgctc

SEQ ID NO: 1018 - DNA, 20 bp, synthetic construct
  source 1..20: mol_type = other DNA
ttgatctgcagtcaaatgct

SEQ ID NO: 1019 - DNA, 20 bp, synthetic construct
  source 1..20: mol_type = other DNA
cttgatctgcagtcaaatgc

SEQ ID NO: 1020 - DNA, 20 bp, synthetic construct
  source 1..20: mol_type = other DNA
tcttgatctgcagtcaaatg

SEQ ID NO: 1021 - DNA, 20 bp, synthetic construct
  source 1..20: mol_type = other DNA
ctcttgatctgcagtcaaat

SEQ ID NO: 1022 - DNA, 20 bp, synthetic construct
  source 1..20: mol_type = other DNA
cctcttgatctgcagtcaaa

SEQ ID NO: 1023 - DNA, 20 bp, synthetic construct
  source 1..20: mol_type = other DNA
acctcttgatctgcagtcaa

SEQ ID NO: 1024 - DNA, 20 bp, synthetic construct
  source 1..20: mol_type = other DNA
gacctcttgatctgcagtca

SEQ ID NO: 1025 - DNA, 20 bp, synthetic construct
  source 1..20: mol_type = other DNA
ggacctcttgatctgcagtc

SEQ ID NO: 1026 - DNA, 20 bp, synthetic construct
  source 1..20: mol_type = other DNA
gggacctcttgatctgcagt

SEQ ID NO: 1027 - DNA, 20 bp, synthetic construct
  source 1..20: mol_type = other DNA
ggggacctcttgatctgcag

SEQ ID NO: 1028 - DNA, 20 bp, synthetic construct
  source 1..20: mol_type = other DNA
tggggacctcttgatctgca

SEQ ID NO: 1029 - DNA, 20 bp, synthetic construct
  source 1..20: mol_type = other DNA
gcagtcaaatgctctacctg

SEQ ID NO: 1030 - DNA, 20 bp, synthetic construct
  source 1..20: mol_type = other DNA
tgcagtcaaatgctctacct

SEQ ID NO: 1031 - DNA, 20 bp, synthetic construct
  source 1..20: mol_type = other DNA
ctgcagtcaaatgctctacc

SEQ ID NO: 1032 - DNA, 20 bp, synthetic construct
  source 1..20: mol_type = other DNA
tctgcagtcaaatgctctac

SEQ ID NO: 1033 - DNA, 20 bp, synthetic construct
  source 1..20: mol_type = other DNA
atctgcagtcaaatgctcta

SEQ ID NO: 1034 - DNA, 20 bp, synthetic construct
  source 1..20: mol_type = other DNA
gatctgcagtcaaatgctct

SEQ ID NO: 1035 - DNA, 20 bp, synthetic construct
  source 1..20: mol_type = other DNA
tgatctgcagtcaaatgctc

SEQ ID NO: 1036 - DNA, 20 bp, synthetic construct
  source 1..20: mol_type = other DNA
ttgatctgcagtcaaatgct

SEQ ID NO: 1037 - DNA, 20 bp, synthetic construct
  source 1..20: mol_type = other DNA
cttgatctgcagtcaaatgc

SEQ ID NO: 1038 - DNA, 20 bp, synthetic construct
  source 1..20: mol_type = other DNA
tcttgatctgcagtcaaatg

SEQ ID NO: 1039 - DNA, 20 bp, synthetic construct
  source 1..20: mol_type = other DNA
ctcttgatctgcagtcaaat

SEQ ID NO: 1040 - DNA, 20 bp, synthetic construct
  source 1..20: mol_type = other DNA
cctcttgatctgcagtcaaa

SEQ ID NO: 1041 - DNA, 20 bp, synthetic construct
  source 1..20: mol_type = other DNA
acctcttgatctgcagtcaa

SEQ ID NO: 1042 - DNA, 20 bp, synthetic construct
  source 1..20: mol_type = other DNA
gacctcttgatctgcagtca

SEQ ID NO: 1043 - DNA, 20 bp, synthetic construct
  source 1..20: mol_type = other DNA
ggacctcttgatctgcagtc

SEQ ID NO: 1044 - DNA, 20 bp, synthetic construct
  source 1..20: mol_type = other DNA
gggacctcttgatctgcagt

SEQ ID NO: 1045 - DNA, 20 bp, synthetic construct
  source 1..20: mol_type = other DNA
ggggacctcttgatctgcag

SEQ ID NO: 1046 - DNA, 20 bp, synthetic construct
  source 1..20: mol_type = other DNA
cggggacctcttgatctgca

SEQ ID NO: 1047 - DNA, 20 bp, synthetic construct
  source 1..20: mol_type = other DNA
gcagtcaagtgctctacccc

SEQ ID NO: 1048 - DNA, 20 bp, synthetic construct
  source 1..20: mol_type = other DNA
tgcagtcaagtgctctaccc

SEQ ID NO: 1049 - DNA, 20 bp, synthetic construct
  source 1..20: mol_type = other DNA
ctgcagtcaagtgctctacc

SEQ ID NO: 1050 - DNA, 20 bp, synthetic construct
  source 1..20: mol_type = other DNA
tctgcagtcaagtgctctac

SEQ ID NO: 1051 - DNA, 20 bp, synthetic construct
  source 1..20: mol_type = other DNA
atctgcagtcaagtgctcta

SEQ ID NO: 1052 - DNA, 20 bp, synthetic construct
  source 1..20: mol_type = other DNA
gatctgcagtcaagtgctct

SEQ ID NO: 1053 - DNA, 20 bp, synthetic construct
  source 1..20: mol_type = other DNA
tgatctgcagtcaagtgctc

SEQ ID NO: 1054 - DNA, 20 bp, synthetic construct
  source 1..20: mol_type = other DNA
ttgatctgcagtcaagtgct

SEQ ID NO: 1055 - DNA, 20 bp, synthetic construct
  source 1..20: mol_type = other DNA
cttgatctgcagtcaagtgc

SEQ ID NO: 1056 - DNA, 20 bp, synthetic construct
  source 1..20: mol_type = other DNA
tcttgatctgcagtcaagtg

SEQ ID NO: 1057 - DNA, 20 bp, synthetic construct
  source 1..20: mol_type = other DNA
ctcttgatctgcagtcaagt

SEQ ID NO: 1058 - DNA, 20 bp, synthetic construct
  source 1..20: mol_type = other DNA
cctcttgatctgcagtcaag

SEQ ID NO: 1059 - DNA, 20 bp, synthetic construct
  source 1..20: mol_type = other DNA
acctcttgatctgcagtcaa

SEQ ID NO: 1060 - DNA, 20 bp, synthetic construct
  source 1..20: mol_type = other DNA
gacctcttgatctgcagtca

SEQ ID NO: 1061 - DNA, 20 bp, synthetic construct
  source 1..20: mol_type = other DNA
ggacctcttgatctgcagtc

SEQ ID NO: 1062 - DNA, 20 bp, synthetic construct
  source 1..20: mol_type = other DNA
gggacctcttgatctgcagt

SEQ ID NO: 1063 - DNA, 20 bp, synthetic construct
  source 1..20: mol_type = other DNA
agggacctcttgatctgcag

SEQ ID NO: 1064 - DNA, 20 bp, synthetic construct
  source 1..20: mol_type = other DNA
cagggacctcttgatctgca

SEQ ID NO: 1065 - DNA, 20 bp, synthetic construct
  source 1..20: mol_type = other DNA
gcagtcaaatgctctaccac

SEQ ID NO: 1066 - DNA, 20 bp, synthetic construct
  source 1..20: mol_type = other DNA
tgcagtcaaatgctctacca

SEQ ID NO: 1067 - DNA, 20 bp, synthetic construct
  source 1..20: mol_type = other DNA
ctgcagtcaaatgctctacc

SEQ ID NO: 1068 - DNA, 20 bp, synthetic construct
  source 1..20: mol_type = other DNA
tctgcagtcaaatgctctac

SEQ ID NO: 1069 - DNA, 20 bp, synthetic construct
  source 1..20: mol_type = other DNA
atctgcagtcaaatgctcta

SEQ ID NO: 1070 - DNA, 20 bp, synthetic construct
  source 1..20: mol_type = other DNA
gatctgcagtcaaatgctct

SEQ ID NO: 1071 - DNA, 20 bp, synthetic construct
  source 1..20: mol_type = other DNA
tgatctgcagtcaaatgctc

SEQ ID NO: 1072 - DNA, 20 bp, synthetic construct
  source 1..20: mol_type = other DNA
ttgatctgcagtcaaatgct

SEQ ID NO: 1073 - DNA, 20 bp, synthetic construct
  source 1..20: mol_type = other DNA
cttgatctgcagtcaaatgc

SEQ ID NO: 1074 - DNA, 20 bp, synthetic construct
  source 1..20: mol_type = other DNA
tcttgatctgcagtcaaatg

SEQ ID NO: 1075 - DNA, 20 bp, synthetic construct
  source 1..20: mol_type = other DNA
ctcttgatctgcagtcaaat

SEQ ID NO: 1076 - DNA, 20 bp, synthetic construct
  source 1..20: mol_type = other DNA
cctcttgatctgcagtcaaa

SEQ ID NO: 1077 - DNA, 20 bp, synthetic construct
  source 1..20: mol_type = other DNA
acctcttgatctgcagtcaa

SEQ ID NO: 1078 - DNA, 20 bp, synthetic construct
  source 1..20: mol_type = other DNA
gacctcttgatctgcagtca

SEQ ID NO: 1079 - DNA, 20 bp, synthetic construct
  source 1..20: mol_type = other DNA
ggacctcttgatctgcagtc

SEQ ID NO: 1080 - DNA, 20 bp, synthetic construct
  source 1..20: mol_type = other DNA
gggacctcttgatctgcagt

SEQ ID NO: 1081 - DNA, 20 bp, synthetic construct
  source 1..20: mol_type = other DNA
agggacctcttgatctgcag

SEQ ID NO: 1082 - DNA, 20 bp, synthetic construct
  source 1..20: mol_type = other DNA
cagggacctcttgatctgca

SEQ ID NO: 1083 - DNA, 20 bp, synthetic construct
  source 1..20: mol_type = other DNA
cagtcaaatgctctacccac

SEQ ID NO: 1084 - DNA, 20 bp, synthetic construct
  source 1..20: mol_type = other DNA
gcagtcaaatgctctaccca

SEQ ID NO: 1085 - DNA, 20 bp, synthetic construct
  source 1..20: mol_type = other DNA
tgcagtcaaatgctctaccc

SEQ ID NO: 1086 - DNA, 20 bp, synthetic construct
  source 1..20: mol_type = other DNA
ctgcagtcaaatgctctacc

SEQ ID NO: 1087 - DNA, 20 bp, synthetic construct
  source 1..20: mol_type = other DNA
tctgcagtcaaatgctctac

SEQ ID NO: 1088 - DNA, 20 bp, synthetic construct
  source 1..20: mol_type = other DNA
atctgcagtcaaatgctcta

SEQ ID NO: 1089 - DNA, 20 bp, synthetic construct
  source 1..20: mol_type = other DNA
gatctgcagtcaaatgctct

SEQ ID NO: 1090 - DNA, 20 bp, synthetic construct
  source 1..20: mol_type = other DNA
tgatctgcagtcaaatgctc

SEQ ID NO: 1091 - DNA, 20 bp, synthetic construct
  source 1..20: mol_type = other DNA
ttgatctgcagtcaaatgct

SEQ ID NO: 1092 - DNA, 20 bp, synthetic construct
  source 1..20: mol_type = other DNA
cttgatctgcagtcaaatgc

SEQ ID NO: 1093 - DNA, 20 bp, synthetic construct
  source 1..20: mol_type = other DNA
tcttgatctgcagtcaaatg

SEQ ID NO: 1094 - DNA, 20 bp, synthetic construct
  source 1..20: mol_type = other DNA
ctcttgatctgcagtcaaat

SEQ ID NO: 1095 - DNA, 20 bp, synthetic construct
  source 1..20: mol_type = other DNA
cctcttgatctgcagtcaaa

SEQ ID NO: 1096 - DNA, 20 bp, synthetic construct
  source 1..20: mol_type = other DNA
acctcttgatctgcagtcaa

SEQ ID NO: 1097 - DNA, 20 bp, synthetic construct
  source 1..20: mol_type = other DNA
gacctcttgatctgcagtca

SEQ ID NO: 1098 - DNA, 20 bp, synthetic construct
  source 1..20: mol_type = other DNA
ggacctcttgatctgcagtc

SEQ ID NO: 1099 - DNA, 20 bp, synthetic construct
  source 1..20: mol_type = other DNA
gggacctcttgatctgcagt

SEQ ID NO: 1100 - DNA, 20 bp, synthetic construct
  source 1..20: mol_type = other DNA
ggggacctcttgatctgcag

SEQ ID NO: 1101 - DNA, 20 bp, synthetic construct
  source 1..20: mol_type = other DNA
gcagtcaaatgctctaccac

SEQ ID NO: 1102 - DNA, 20 bp, synthetic construct
  source 1..20: mol_type = other DNA
tgcagtcaaatgctctacca

SEQ ID NO: 1103 - DNA, 20 bp, synthetic construct
  source 1..20: mol_type = other DNA
ctgcagtcaaatgctctacc

SEQ ID NO: 1104 - DNA, 20 bp, synthetic construct
  source 1..20: mol_type = other DNA
tctgcagtcaaatgctctac

SEQ ID NO: 1105 - DNA, 20 bp, synthetic construct
  source 1..20: mol_type = other DNA
atctgcagtcaaatgctcta

SEQ ID NO: 1106 - DNA, 20 bp, synthetic construct
  source 1..20: mol_type = other DNA
gatctgcagtcaaatgctct

SEQ ID NO: 1107 - DNA, 20 bp, synthetic construct
  source 1..20: mol_type = other DNA
tgatctgcagtcaaatgctc

SEQ ID NO: 1108 - DNA, 20 bp, synthetic construct
  source 1..20: mol_type = other DNA
ttgatctgcagtcaaatgct

SEQ ID NO: 1109 - DNA, 20 bp, synthetic construct
  source 1..20: mol_type = other DNA
cttgatctgcagtcaaatgc

SEQ ID NO: 1110 - DNA, 20 bp, synthetic construct
  source 1..20: mol_type = other DNA
tcttgatctgcagtcaaatg

SEQ ID NO: 1111 - DNA, 20 bp, synthetic construct
  source 1..20: mol_type = other DNA
ctcttgatctgcagtcaaat

SEQ ID NO: 1112 - DNA, 20 bp, synthetic construct
  source 1..20: mol_type = other DNA
cctcttgatctgcagtcaaa

SEQ ID NO: 1113 - DNA, 20 bp, synthetic construct
  source 1..20: mol_type = other DNA
acctcttgatctgcagtcaa

SEQ ID NO: 1114 - DNA, 20 bp, synthetic construct
  source 1..20: mol_type = other DNA
gacctcttgatctgcagtca

SEQ ID NO: 1115 - DNA, 20 bp, synthetic construct
  source 1..20: mol_type = other DNA
ggacctcttgatctgcagtc

SEQ ID NO: 1116 - DNA, 20 bp, synthetic construct
  source 1..20: mol_type = other DNA
gggacctcttgatctgcagt

SEQ ID NO: 1117 - DNA, 20 bp, synthetic construct
  source 1..20: mol_type = other DNA
agggacctcttgatctgcag

SEQ ID NO: 1118 - DNA, 20 bp, synthetic construct
  source 1..20: mol_type = other DNA
cagggacctcttgatctgca

SEQ ID NO: 1119 - DNA, 20 bp, synthetic construct
  source 1..20: mol_type = other DNA
cagtcaaatgctctaccacc

SEQ ID NO: 1120 - DNA, 20 bp, synthetic construct
  source 1..20: mol_type = other DNA
gcagtcaaatgctctaccac

SEQ ID NO: 1121 - DNA, 20 bp, synthetic construct
  source 1..20: mol_type = other DNA
tgcagtcaaatgctctacca

SEQ ID NO: 1122 - DNA, 20 bp, synthetic construct
  source 1..20: mol_type = other DNA
ctgcagtcaaatgctctacc

SEQ ID NO: 1123 - DNA, 20 bp, synthetic construct
  source 1..20: mol_type = other DNA
tctgcagtcaaatgctctac

SEQ ID NO: 1124 - DNA, 20 bp, synthetic construct
  source 1..20: mol_type = other DNA
atctgcagtcaaatgctcta

SEQ ID NO: 1125 - DNA, 20 bp, synthetic construct
  source 1..20: mol_type = other DNA
gatctgcagtcaaatgctct

SEQ ID NO: 1126 - DNA, 20 bp, synthetic construct
  source 1..20: mol_type = other DNA
tgatctgcagtcaaatgctc

SEQ ID NO: 1127 - DNA, 20 bp, synthetic construct
  source 1..20: mol_type = other DNA
ttgatctgcagtcaaatgct

SEQ ID NO: 1128 - DNA, 20 bp, synthetic construct
  source 1..20: mol_type = other DNA
cttgatctgcagtcaaatgc

SEQ ID NO: 1129 - DNA, 20 bp, synthetic construct
  source 1..20: mol_type = other DNA
tcttgatctgcagtcaaatg

SEQ ID NO: 1130 - DNA, 20 bp, synthetic construct
  source 1..20: mol_type = other DNA
ctcttgatctgcagtcaaat

SEQ ID NO: 1131 - DNA, 20 bp, synthetic construct
  source 1..20: mol_type = other DNA
cctcttgatctgcagtcaaa

SEQ ID NO: 1132 - DNA, 20 bp, synthetic construct
  source 1..20: mol_type = other DNA
acctcttgatctgcagtcaa

SEQ ID NO: 1133 - DNA, 20 bp, synthetic construct
  source 1..20: mol_type = other DNA
gacctcttgatctgcagtca

SEQ ID NO: 1134 - DNA, 20 bp, synthetic construct
  source 1..20: mol_type = other DNA
ggacctcttgatctgcagtc

SEQ ID NO: 1135 - DNA, 20 bp, synthetic construct
  source 1..20: mol_type = other DNA
gggacctcttgatctgcagt

SEQ ID NO: 1136 - DNA, 20 bp, synthetic construct
  source 1..20: mol_type = other DNA
ggggacctcttgatctgcag

SEQ ID NO: 1137 - DNA, 20 bp, synthetic construct
  source 1..20: mol_type = other DNA
gcagtcaaatgctctacccc

SEQ ID NO: 1138 - DNA, 20 bp, synthetic construct
  source 1..20: mol_type = other DNA
tgcagtcaaatgctctaccc

SEQ ID NO: 1139 - DNA, 20 bp, synthetic construct
  source 1..20: mol_type = other DNA
ctgcagtcaaatgctctacc

SEQ ID NO: 1140 - DNA, 20 bp, synthetic construct
  source 1..20: mol_type = other DNA
tctgcagtcaaatgctctac

SEQ ID NO: 1141 - DNA, 20 bp, synthetic construct
  source 1..20: mol_type = other DNA
atctgcagtcaaatgctcta

SEQ ID NO: 1142 - DNA, 20 bp, synthetic construct
  source 1..20: mol_type = other DNA
gatctgcagtcaaatgctct

SEQ ID NO: 1143 - DNA, 20 bp, synthetic construct
  source 1..20: mol_type = other DNA
tgatctgcagtcaaatgctc

SEQ ID NO: 1144 - DNA, 20 bp, synthetic construct
  source 1..20: mol_type = other DNA
ttgatctgcagtcaaatgct

SEQ ID NO: 1145 - DNA, 20 bp, synthetic construct
  source 1..20: mol_type = other DNA
cttgatctgcagtcaaatgc

SEQ ID NO: 1146 - DNA, 20 bp, synthetic construct
  source 1..20: mol_type = other DNA
tcttgatctgcagtcaaatg

SEQ ID NO: 1147 - DNA, 20 bp, synthetic construct
  source 1..20: mol_type = other DNA
ctcttgatctgcagtcaaat

SEQ ID NO: 1148 - DNA, 20 bp, synthetic construct
  source 1..20: mol_type = other DNA
cctcttgatctgcagtcaaa

SEQ ID NO: 1149 - DNA, 20 bp, synthetic construct
  source 1..20: mol_type = other DNA
acctcttgatctgcagtcaa

SEQ ID NO: 1150 - DNA, 20 bp, synthetic construct
  source 1..20: mol_type = other DNA
gacctcttgatctgcagtca

SEQ ID NO: 1151 - DNA, 20 bp, synthetic construct
  source 1..20: mol_type = other DNA
ggacctcttgatctgcagtc

SEQ ID NO: 1152 - DNA, 20 bp, synthetic construct
  source 1..20: mol_type = other DNA
gggacctcttgatctgcagt

SEQ ID NO: 1153 - DNA, 20 bp, synthetic construct
  source 1..20: mol_type = other DNA
ggggacctcttgatctgcag

SEQ ID NO: 1154 - DNA, 20 bp, synthetic construct
  source 1..20: mol_type = other DNA
cggggacctcttgatctgca

SEQ ID NO: 1155 - DNA, 20 bp, synthetic construct
  source 1..20: mol_type = other DNA
gcagtcaaatgctctacccc

SEQ ID NO: 1156 - DNA, 20 bp, synthetic construct
  source 1..20: mol_type = other DNA
tgcagtcaaatgctctaccc

SEQ ID NO: 1157 - DNA, 20 bp, synthetic construct
  source 1..20: mol_type = other DNA
ctgcagtcaaatgctctacc

SEQ ID NO: 1158 - DNA, 20 bp, synthetic construct
  source 1..20: mol_type = other DNA
tctgcagtcaaatgctctac

SEQ ID NO: 1159 - DNA, 20 bp, synthetic construct
  source 1..20: mol_type = other DNA
atctgcagtcaaatgctcta

SEQ ID NO: 1160 - DNA, 20 bp, synthetic construct
  source 1..20: mol_type = other DNA
gatctgcagtcaaatgctct

SEQ ID NO: 1161 - DNA, 20 bp, synthetic construct
  source 1..20: mol_type = other DNA
tgatctgcagtcaaatgctc

SEQ ID NO: 1162 - DNA, 20 bp, synthetic construct
  source 1..20: mol_type = other DNA
ttgatctgcagtcaaatgct

SEQ ID NO: 1163 - DNA, 20 bp, synthetic construct
  source 1..20: mol_type = other DNA
cttgatctgcagtcaaatgc

SEQ ID NO: 1164 - DNA, 20 bp, synthetic construct
  source 1..20: mol_type = other DNA
tcttgatctgcagtcaaatg

SEQ ID NO: 1165 - DNA, 20 bp, synthetic construct
  source 1..20: mol_type = other DNA
ctcttgatctgcagtcaaat

SEQ ID NO: 1166 - DNA, 20 bp, synthetic construct
  source 1..20: mol_type = other DNA
cctcttgatctgcagtcaaa

SEQ ID NO: 1167 - DNA, 20 bp, synthetic construct
  source 1..20: mol_type = other DNA
acctcttgatctgcagtcaa

SEQ ID NO: 1168 - DNA, 20 bp, synthetic construct
  source 1..20: mol_type = other DNA
gacctcttgatctgcagtca

SEQ ID NO: 1169 - DNA, 20 bp, synthetic construct
  source 1..20: mol_type = other DNA
ggacctcttgatctgcagtc

SEQ ID NO: 1170 - DNA, 20 bp, synthetic construct
  source 1..20: mol_type = other DNA
gggacctcttgatctgcagt

SEQ ID NO: 1171 - DNA, 20 bp, synthetic construct
  source 1..20: mol_type = other DNA
agggacctcttgatctgcag

SEQ ID NO: 1172 - DNA, 20 bp, synthetic construct
  source 1..20: mol_type = other DNA
cagggacctcttgatctgca

SEQ ID NO: 1173 - DNA, 20 bp, synthetic construct
  source 1..20: mol_type = other DNA
gcagtcaaatgctctacccc

SEQ ID NO: 1174 - DNA, 20 bp, synthetic construct
  source 1..20: mol_type = other DNA
tgcagtcaaatgctctaccc

SEQ ID NO: 1175 - DNA, 20 bp, synthetic construct
  source 1..20: mol_type = other DNA
ctgcagtcaaatgctctacc

SEQ ID NO: 1176 - DNA, 20 bp, synthetic construct
  source 1..20: mol_type = other DNA
tctgcagtcaaatgctctac

SEQ ID NO: 1177 - DNA, 20 bp, synthetic construct
  source 1..20: mol_type = other DNA
atctgcagtcaaatgctcta

SEQ ID NO: 1178 - DNA, 20 bp, synthetic construct
  source 1..20: mol_type = other DNA
gatctgcagtcaaatgctct

SEQ ID NO: 1179 - DNA, 20 bp, synthetic construct
  source 1..20: mol_type = other DNA
tgatctgcagtcaaatgctc

SEQ ID NO: 1180 - DNA, 20 bp, synthetic construct
  source 1..20: mol_type = other DNA
ttgatctgcagtcaaatgct

SEQ ID NO: 1181 - DNA, 20 bp, synthetic construct
  source 1..20: mol_type = other DNA
cttgatctgcagtcaaatgc

SEQ ID NO: 1182 - DNA, 20 bp, synthetic construct
  source 1..20: mol_type = other DNA
tcttgatctgcagtcaaatg

SEQ ID NO: 1183 - DNA, 20 bp, synthetic construct
  source 1..20: mol_type = other DNA
ctcttgatctgcagtcaaat

SEQ ID NO: 1184 - DNA, 20 bp, synthetic construct
  source 1..20: mol_type = other DNA
cctcttgatctgcagtcaaa

SEQ ID NO: 1185 - DNA, 20 bp, synthetic construct
  source 1..20: mol_type = other DNA
acctcttgatctgcagtcaa

SEQ ID NO: 1186 - DNA, 20 bp, synthetic construct
  source 1..20: mol_type = other DNA
gacctcttgatctgcagtca

SEQ ID NO: 1187 - DNA, 20 bp, synthetic construct
  source 1..20: mol_type = other DNA
ggacctcttgatctgcagtc

SEQ ID NO: 1188 - DNA, 20 bp, synthetic construct
  source 1..20: mol_type = other DNA
gggacctcttgatctgcagt

SEQ ID NO: 1189 - DNA, 20 bp, synthetic construct
  source 1..20: mol_type = other DNA
agggacctcttgatctgcag

SEQ ID NO: 1190 - DNA, 20 bp, synthetic construct
  source 1..20: mol_type = other DNA
cagggacctcttgatctgca

SEQ ID NO: 1191 - DNA, 20 bp, synthetic construct
  source 1..20: mol_type = other DNA
gcagtcaaatgctctacccc

SEQ ID NO: 1192 - DNA, 20 bp, synthetic construct
  source 1..20: mol_type = other DNA
tgcagtcaaatgctctaccc

SEQ ID NO: 1193 - DNA, 20 bp, synthetic construct
  source 1..20: mol_type = other DNA
ctgcagtcaaatgctctacc

SEQ ID NO: 1194 - DNA, 20 bp, synthetic construct
  source 1..20: mol_type = other DNA
tctgcagtcaaatgctctac

SEQ ID NO: 1195 - DNA, 20 bp, synthetic construct
  source 1..20: mol_type = other DNA
atctgcagtcaaatgctcta

SEQ ID NO: 1196 - DNA, 20 bp, synthetic construct
  source 1..20: mol_type = other DNA
gatctgcagtcaaatgctct

SEQ ID NO: 1197 - DNA, 20 bp, synthetic construct
  source 1..20: mol_type = other DNA
tgatctgcagtcaaatgctc

SEQ ID NO: 1198 - DNA, 20 bp, synthetic construct
  source 1..20: mol_type = other DNA
ttgatctgcagtcaaatgct

SEQ ID NO: 1199 - DNA, 20 bp, synthetic construct
  source 1..20: mol_type = other DNA
cttgatctgcagtcaaatgc

SEQ ID NO: 1200 - DNA, 20 bp, synthetic construct
  source 1..20: mol_type = other DNA
tcttgatctgcagtcaaatg

SEQ ID NO: 1201 - DNA, 20 bp, synthetic construct
  source 1..20: mol_type = other DNA
ctcttgatctgcagtcaaat

SEQ ID NO: 1202 - DNA, 20 bp, synthetic construct
  source 1..20: mol_type = other DNA
cctcttgatctgcagtcaaa

SEQ ID NO: 1203 - DNA, 20 bp, synthetic construct
  source 1..20: mol_type = other DNA
acctcttgatctgcagtcaa

SEQ ID NO: 1204 - DNA, 20 bp, synthetic construct
  source 1..20: mol_type = other DNA
gacctcttgatctgcagtca

SEQ ID NO: 1205 - DNA, 20 bp, synthetic construct
  source 1..20: mol_type = other DNA
ggacctcttgatctgcagtc

SEQ ID NO: 1206 - DNA, 20 bp, synthetic construct
  source 1..20: mol_type = other DNA
gggacctcttgatctgcagt

SEQ ID NO: 1207 - DNA, 20 bp, synthetic construct
  source 1..20: mol_type = other DNA
agggacctcttgatctgcag

SEQ ID NO: 1208 - DNA, 20 bp, synthetic construct
  source 1..20: mol_type = other DNA
cagggacctcttgatctgca

SEQ ID NO: 1209 - DNA, 20 bp, synthetic construct
  source 1..20: mol_type = other DNA
gcagtcaaatgctctacccc

SEQ ID NO: 1210 - DNA, 20 bp, synthetic construct
  source 1..20: mol_type = other DNA
tgcagtcaaatgctctaccc

SEQ ID NO: 1211 - DNA, 20 bp, synthetic construct
  source 1..20: mol_type = other DNA
ctgcagtcaaatgctctacc

SEQ ID NO: 1212 - DNA, 20 bp, synthetic construct
  source 1..20: mol_type = other DNA
tctgcagtcaaatgctctac

SEQ ID NO: 1213 - DNA, 20 bp, synthetic construct
  source 1..20: mol_type = other DNA
atctgcagtcaaatgctcta

SEQ ID NO: 1214 - DNA, 20 bp, synthetic construct
  source 1..20: mol_type = other DNA
gatctgcagtcaaatgctct

SEQ ID NO: 1215 - DNA, 20 bp, synthetic construct
  source 1..20: mol_type = other DNA
tgatctgcagtcaaatgctc

SEQ ID NO: 1216 - DNA, 20 bp, synthetic construct
  source 1..20: mol_type = other DNA
ttgatctgcagtcaaatgct

SEQ ID NO: 1217 - DNA, 20 bp, synthetic construct
  source 1..20: mol_type = other DNA
cttgatctgcagtcaaatgc

SEQ ID NO: 1218 - DNA, 20 bp, synthetic construct
  source 1..20: mol_type = other DNA
tcttgatctgcagtcaaatg

SEQ ID NO: 1219 - DNA, 20 bp, synthetic construct
  source 1..20: mol_type = other DNA
ctcttgatctgcagtcaaat

SEQ ID NO: 1220 - DNA, 20 bp, synthetic construct
  source 1..20: mol_type = other DNA
cctcttgatctgcagtcaaa

SEQ ID NO: 1221 - DNA, 20 bp, synthetic construct
  source 1..20: mol_type = other DNA
acctcttgatctgcagtcaa

SEQ ID NO: 1222 - DNA, 20 bp, synthetic construct
  source 1..20: mol_type = other DNA
gacctcttgatctgcagtca

SEQ ID NO: 1223 - DNA, 20 bp, synthetic construct
  source 1..20: mol_type = other DNA
ggacctcttgatctgcagtc

SEQ ID NO: 1224 - DNA, 20 bp, synthetic construct
  source 1..20: mol_type = other DNA
gggacctcttgatctgcagt

SEQ ID NO: 1225 - DNA, 20 bp, synthetic construct
  source 1..20: mol_type = other DNA
agggacctcttgatctgcag

SEQ ID NO: 1226 - DNA, 20 bp, synthetic construct
  source 1..20: mol_type = other DNA
cagggacctcttgatctgca

SEQ ID NO: 1227 - DNA, 20 bp, synthetic construct
  source 1..20: mol_type = other DNA
gagtccagagtgctaaccat

SEQ ID NO: 1228 - DNA, 20 bp, synthetic construct
  source 1..20: mol_type = other DNA
agagtccagagtgctaacca

SEQ ID NO: 1229 - DNA, 20 bp, synthetic construct
  source 1..20: mol_type = other DNA
cagagtccagagtgctaacc

SEQ ID NO: 1230 - DNA, 20 bp, synthetic construct
  source 1..20: mol_type = other DNA
tcagagtccagagtgctaac

SEQ ID NO: 1231 - DNA, 20 bp, synthetic construct
  source 1..20: mol_type = other DNA
ttcagagtccagagtgctaa

SEQ ID NO: 1232 - DNA, 20 bp, synthetic construct
  source 1..20: mol_type = other DNA
attcagagtccagagtgcta

SEQ ID NO: 1233 - DNA, 20 bp, synthetic construct
  source 1..20: mol_type = other DNA
gattcagagtccagagtgct

SEQ ID NO: 1234 - DNA, 20 bp, synthetic construct
  source 1..20: mol_type = other DNA
ggattcagagtccagagtgc

SEQ ID NO: 1235 - DNA, 20 bp, synthetic construct
  source 1..20: mol_type = other DNA
tggattcagagtccagagtg

SEQ ID NO: 1236 - DNA, 20 bp, synthetic construct
  source 1..20: mol_type = other DNA
ctggattcagagtccagagt

SEQ ID NO: 1237 - DNA, 20 bp, synthetic construct
  source 1..20: mol_type = other DNA
gctggattcagagtccagag

SEQ ID NO: 1238 - DNA, 20 bp, synthetic construct
  source 1..20: mol_type = other DNA
cgctggattcagagtccaga

SEQ ID NO: 1239 - DNA, 20 bp, synthetic construct
  source 1..20: mol_type = other DNA
tcgctggattcagagtccag

SEQ ID NO: 1240 - DNA, 20 bp, synthetic construct
  source 1..20: mol_type = other DNA
atcgctggattcagagtcca

SEQ ID NO: 1241 - DNA, 20 bp, synthetic construct
  source 1..20: mol_type = other DNA
gatcgctggattcagagtcc

SEQ ID NO: 1242 - DNA, 20 bp, synthetic construct
  source 1..20: mol_type = other DNA
ggatcgctggattcagagtc

SEQ ID NO: 1243 - DNA, 20 bp, synthetic construct
  source 1..20: mol_type = other DNA
cggatcgctggattcagagt

SEQ ID NO: 1244 - DNA, 20 bp, synthetic construct
  source 1..20: mol_type = other DNA
tcggatcgctggattcagag

SEQ ID NO: 1245 - DNA, 20 bp, synthetic construct
  source 1..20: mol_type = other DNA
gagtccagagtgctaaccat

SEQ ID NO: 1246 - DNA, 20 bp, synthetic construct
  source 1..20: mol_type = other DNA
agagtccagagtgctaacca

SEQ ID NO: 1247 - DNA, 20 bp, synthetic construct
  source 1..20: mol_type = other DNA
cagagtccagagtgctaacc

SEQ ID NO: 1248 - DNA, 20 bp, synthetic construct
  source 1..20: mol_type = other DNA
tcagagtccagagtgctaac

SEQ ID NO: 1249 - DNA, 20 bp, synthetic construct
  source 1..20: mol_type = other DNA
ttcagagtccagagtgctaa

SEQ ID NO: 1250 - DNA, 20 bp, synthetic construct
  source 1..20: mol_type = other DNA
attcagagtccagagtgcta

SEQ ID NO: 1251 - DNA, 20 bp, synthetic construct
  source 1..20: mol_type = other DNA
gattcagagtccagagtgct

SEQ ID NO: 1252 - DNA, 20 bp, synthetic construct
  source 1..20: mol_type = other DNA
ggattcagagtccagagtgc

SEQ ID NO: 1253 - DNA, 20 bp, synthetic construct
  source 1..20: mol_type = other DNA
tggattcagagtccagagtg

SEQ ID NO: 1254 - DNA, 20 bp, synthetic construct
  source 1..20: mol_type = other DNA
ctggattcagagtccagagt

SEQ ID NO: 1255 - DNA, 20 bp, synthetic construct
  source 1..20: mol_type = other DNA
gctggattcagagtccagag

SEQ ID NO: 1256 - DNA, 20 bp, synthetic construct
  source 1..20: mol_type = other DNA
cgctggattcagagtccaga

SEQ ID NO: 1257 - DNA, 20 bp, synthetic construct
  source 1..20: mol_type = other DNA
tcgctggattcagagtccag

SEQ ID NO: 1258 - DNA, 20 bp, synthetic construct
  source 1..20: mol_type = other DNA
atcgctggattcagagtcca

SEQ ID NO: 1259 - DNA, 20 bp, synthetic construct
  source 1..20: mol_type = other DNA
gatcgctggattcagagtcc

SEQ ID NO: 1260 - DNA, 20 bp, synthetic construct
  source 1..20: mol_type = other DNA
ggatcgctggattcagagtc

SEQ ID NO: 1261 - DNA, 20 bp, synthetic construct
  source 1..20: mol_type = other DNA
cggatcgctggattcagagt

SEQ ID NO: 1262 - DNA, 20 bp, synthetic construct
  source 1..20: mol_type = other DNA
tcggatcgctggattcagag

SEQ ID NO: 1263 - DNA, 20 bp, synthetic construct
  source 1..20: mol_type = other DNA
gagtccagagtgctaaccat

SEQ ID NO: 1264 - DNA, 20 bp, synthetic construct
  source 1..20: mol_type = other DNA
agagtccagagtgctaacca

SEQ ID NO: 1265 - DNA, 20 bp, synthetic construct
  source 1..20: mol_type = other DNA
cagagtccagagtgctaacc

SEQ ID NO: 1266 - DNA, 20 bp, synthetic construct
  source 1..20: mol_type = other DNA
tcagagtccagagtgctaac

SEQ ID NO: 1267 - DNA, 20 bp, synthetic construct
  source 1..20: mol_type = other DNA
ttcagagtccagagtgctaa

SEQ ID NO: 1268 - DNA, 20 bp, synthetic construct
  source 1..20: mol_type = other DNA
attcagagtccagagtgcta

SEQ ID NO: 1269 - DNA, 20 bp, synthetic construct
  source 1..20: mol_type = other DNA
gattcagagtccagagtgct

SEQ ID NO: 1270 - DNA, 20 bp, synthetic construct
  source 1..20: mol_type = other DNA
ggattcagagtccagagtgc

SEQ ID NO: 1271 - DNA, 20 bp, synthetic construct
  source 1..20: mol_type = other DNA
tggattcagagtccagagtg

SEQ ID NO: 1272 - DNA, 20 bp, synthetic construct
  source 1..20: mol_type = other DNA
ctggattcagagtccagagt

SEQ ID NO: 1273 - DNA, 20 bp, synthetic construct
  source 1..20: mol_type = other DNA
gctggattcagagtccagag

SEQ ID NO: 1274 - DNA, 20 bp, synthetic construct
  source 1..20: mol_type = other DNA
cgctggattcagagtccaga

SEQ ID NO: 1275 - DNA, 20 bp, synthetic construct
  source 1..20: mol_type = other DNA
tcgctggattcagagtccag

SEQ ID NO: 1276 - DNA, 20 bp, synthetic construct
  source 1..20: mol_type = other DNA
atcgctggattcagagtcca

SEQ ID NO: 1277 - DNA, 20 bp, synthetic construct
  source 1..20: mol_type = other DNA
gatcgctggattcagagtcc

SEQ ID NO: 1278 - DNA, 20 bp, synthetic construct
  source 1..20: mol_type = other DNA
ggatcgctggattcagagtc

SEQ ID NO: 1279 - DNA, 20 bp, synthetic construct
  source 1..20: mol_type = other DNA
cggatcgctggattcagagt

SEQ ID NO: 1280 - DNA, 20 bp, synthetic construct
  source 1..20: mol_type = other DNA
tcggatcgctggattcagag

SEQ ID NO: 1281 - DNA, 20 bp, synthetic construct
  source 1..20: mol_type = other DNA
gagtccagagtgctaaccat

SEQ ID NO: 1282 - DNA, 20 bp, synthetic construct
  source 1..20: mol_type = other DNA
agagtccagagtgctaacca

SEQ ID NO: 1283 - DNA, 20 bp, synthetic construct
  source 1..20: mol_type = other DNA
cagagtccagagtgctaacc

SEQ ID NO: 1284 - DNA, 20 bp, synthetic construct
  source 1..20: mol_type = other DNA
tcagagtccagagtgctaac

SEQ ID NO: 1285 - DNA, 20 bp, synthetic construct
  source 1..20: mol_type = other DNA
ttcagagtccagagtgctaa

SEQ ID NO: 1286 - DNA, 20 bp, synthetic construct
  source 1..20: mol_type = other DNA
attcagagtccagagtgcta

SEQ ID NO: 1287 - DNA, 20 bp, synthetic construct
  source 1..20: mol_type = other DNA
gattcagagtccagagtgct

SEQ ID NO: 1288 - DNA, 20 bp, synthetic construct
  source 1..20: mol_type = other DNA
ggattcagagtccagagtgc

SEQ ID NO: 1289 - DNA, 20 bp, synthetic construct
  source 1..20: mol_type = other DNA
tggattcagagtccagagtg

SEQ ID NO: 1290 - DNA, 20 bp, synthetic construct
  source 1..20: mol_type = other DNA
ctggattcagagtccagagt

SEQ ID NO: 1291 - DNA, 20 bp, synthetic construct
  source 1..20: mol_type = other DNA
gctggattcagagtccagag

SEQ ID NO: 1292 - DNA, 20 bp, synthetic construct
  source 1..20: mol_type = other DNA
cgctggattcagagtccaga

SEQ ID NO: 1293 - DNA, 20 bp, synthetic construct
  source 1..20: mol_type = other DNA
tcgctggattcagagtccag

SEQ ID NO: 1294 - DNA, 20 bp, synthetic construct
  source 1..20: mol_type = other DNA
atcgctggattcagagtcca

SEQ ID NO: 1295 - DNA, 20 bp, synthetic construct
  source 1..20: mol_type = other DNA
gatcgctggattcagagtcc

SEQ ID NO: 1296 - DNA, 20 bp, synthetic construct
  source 1..20: mol_type = other DNA
ggatcgctggattcagagtc

SEQ ID NO: 1297 - DNA, 20 bp, synthetic construct
  source 1..20: mol_type = other DNA
cggatcgctggattcagagt

SEQ ID NO: 1298 - DNA, 20 bp, synthetic construct
  source 1..20: mol_type = other DNA
tcggatcgctggattcagag

SEQ ID NO: 1299 - DNA, 20 bp, synthetic construct
  source 1..20: mol_type = other DNA
gagtccagagtgctaaccat

SEQ ID NO: 1300 - DNA, 20 bp, synthetic construct
  source 1..20: mol_type = other DNA
agagtccagagtgctaacca

SEQ ID NO: 1301 - DNA, 20 bp, synthetic construct
  source 1..20: mol_type = other DNA
cagagtccagagtgctaacc

SEQ ID NO: 1302 - DNA, 20 bp, synthetic construct
  source 1..20: mol_type = other DNA
tcagagtccagagtgctaac

SEQ ID NO: 1303 - DNA, 20 bp, synthetic construct
  source 1..20: mol_type = other DNA
ttcagagtccagagtgctaa

SEQ ID NO: 1304 - DNA, 20 bp, synthetic construct
  source 1..20: mol_type = other DNA
attcagagtccagagtgcta

SEQ ID NO: 1305 - DNA, 20 bp, synthetic construct
  source 1..20: mol_type = other DNA
gattcagagtccagagtgct

SEQ ID NO: 1306 - DNA, 20 bp, synthetic construct
  source 1..20: mol_type = other DNA
ggattcagagtccagagtgc

SEQ ID NO: 1307 - DNA, 20 bp, synthetic construct
  source 1..20: mol_type = other DNA
tggattcagagtccagagtg

SEQ ID NO: 1308 - DNA, 20 bp, synthetic construct
  source 1..20: mol_type = other DNA
ctggattcagagtccagagt

SEQ ID NO: 1309 - DNA, 20 bp, synthetic construct
  source 1..20: mol_type = other DNA
gctggattcagagtccagag

SEQ ID NO: 1310 - DNA, 20 bp, synthetic construct
  source 1..20: mol_type = other DNA
cgctggattcagagtccaga

SEQ ID NO: 1311 - DNA, 20 bp, synthetic construct
  source 1..20: mol_type = other DNA
tcgctggattcagagtccag

SEQ ID NO: 1312 - DNA, 20 bp, synthetic construct
  source 1..20: mol_type = other DNA
atcgctggattcagagtcca

SEQ ID NO: 1313 - DNA, 20 bp, synthetic construct
  source 1..20: mol_type = other DNA
gatcgctggattcagagtcc

SEQ ID NO: 1314 - DNA, 20 bp, synthetic construct
  source 1..20: mol_type = other DNA
ggatcgctggattcagagtc

SEQ ID NO: 1315 - DNA, 20 bp, synthetic construct
  source 1..20: mol_type = other DNA
cggatcgctggattcagagt

SEQ ID NO: 1316 - DNA, 20 bp, synthetic construct
  source 1..20: mol_type = other DNA
tcggatcgctggattcagag

SEQ ID NO: 1317 - DNA, 20 bp, synthetic construct
  source 1..20: mol_type = other DNA
gagtccagagtgctaaccat

SEQ ID NO: 1318 - DNA, 20 bp, synthetic construct
  source 1..20: mol_type = other DNA
agagtccagagtgctaacca

SEQ ID NO: 1319 - DNA, 20 bp, synthetic construct
  source 1..20: mol_type = other DNA
cagagtccagagtgctaacc

SEQ ID NO: 1320 - DNA, 20 bp, synthetic construct
  source 1..20: mol_type = other DNA
tcagagtccagagtgctaac

SEQ ID NO: 1321 - DNA, 20 bp, synthetic construct
  source 1..20: mol_type = other DNA
ttcagagtccagagtgctaa

SEQ ID NO: 1322 - DNA, 20 bp, synthetic construct
  source 1..20: mol_type = other DNA
attcagagtccagagtgcta

SEQ ID NO: 1323 - DNA, 20 bp, synthetic construct
  source 1..20: mol_type = other DNA
gattcagagtccagagtgct

SEQ ID NO: 1324 - DNA, 20 bp, synthetic construct
  source 1..20: mol_type = other DNA
ggattcagagtccagagtgc

SEQ ID NO: 1325 - DNA, 20 bp, synthetic construct
  source 1..20: mol_type = other DNA
tggattcagagtccagagtg

SEQ ID NO: 1326 - DNA, 20 bp, synthetic construct
  source 1..20: mol_type = other DNA
ctggattcagagtccagagt

SEQ ID NO: 1327 - DNA, 20 bp, synthetic construct
  source 1..20: mol_type = other DNA
gctggattcagagtccagag

SEQ ID NO: 1328 - DNA, 20 bp, synthetic construct
  source 1..20: mol_type = other DNA
cgctggattcagagtccaga

SEQ ID NO: 1329 - DNA, 20 bp, synthetic construct
  source 1..20: mol_type = other DNA
tcgctggattcagagtccag

SEQ ID NO: 1330 - DNA, 20 bp, synthetic construct
  source 1..20: mol_type = other DNA
atcgctggattcagagtcca

SEQ ID NO: 1331 - DNA, 20 bp, synthetic construct
  source 1..20: mol_type = other DNA
gatcgctggattcagagtcc

SEQ ID NO: 1332 - DNA, 20 bp, synthetic construct
  source 1..20: mol_type = other DNA
ggatcgctggattcagagtc

SEQ ID NO: 1333 - DNA, 20 bp, synthetic construct
  source 1..20: mol_type = other DNA
cggatcgctggattcagagt

SEQ ID NO: 1334 - DNA, 20 bp, synthetic construct
  source 1..20: mol_type = other DNA
tcggatcgctggattcagag

SEQ ID NO: 1335 - DNA, 20 bp, synthetic construct
  source 1..20: mol_type = other DNA
gagtccagagtgctcaccat

SEQ ID NO: 1336 - DNA, 20 bp, synthetic construct
  source 1..20: mol_type = other DNA
agagtccagagtgctcacca

SEQ ID NO: 1337 - DNA, 20 bp, synthetic construct
  source 1..20: mol_type = other DNA
cagagtccagagtgctcacc

SEQ ID NO: 1338 - DNA, 20 bp, synthetic construct
  source 1..20: mol_type = other DNA
tcagagtccagagtgctcac

SEQ ID NO: 1339 - DNA, 20 bp, synthetic construct
  source 1..20: mol_type = other DNA
ttcagagtccagagtgctca

SEQ ID NO: 1340 - DNA, 20 bp, synthetic construct
  source 1..20: mol_type = other DNA
attcagagtccagagtgctc

SEQ ID NO: 1341 - DNA, 20 bp, synthetic construct
  source 1..20: mol_type = other DNA
gattcagagtccagagtgct

SEQ ID NO: 1342 - DNA, 20 bp, synthetic construct
  source 1..20: mol_type = other DNA
ggattcagagtccagagtgc

SEQ ID NO: 1343 - DNA, 20 bp, synthetic construct
  source 1..20: mol_type = other DNA
tggattcagagtccagagtg

SEQ ID NO: 1344 - DNA, 20 bp, synthetic construct
  source 1..20: mol_type = other DNA
ctggattcagagtccagagt

SEQ ID NO: 1345 - DNA, 20 bp, synthetic construct
  source 1..20: mol_type = other DNA
gctggattcagagtccagag

SEQ ID NO: 1346 - DNA, 20 bp, synthetic construct
  source 1..20: mol_type = other DNA
cgctggattcagagtccaga

SEQ ID NO: 1347 - DNA, 20 bp, synthetic construct
  source 1..20: mol_type = other DNA
tcgctggattcagagtccag

SEQ ID NO: 1348 - DNA, 20 bp, synthetic construct
  source 1..20: mol_type = other DNA
atcgctggattcagagtcca

SEQ ID NO: 1349 - DNA, 20 bp, synthetic construct
  source 1..20: mol_type = other DNA
gatcgctggattcagagtcc

SEQ ID NO: 1350 - DNA, 20 bp, synthetic construct
  source 1..20: mol_type = other DNA
ggatcgctggattcagagtc

SEQ ID NO: 1351 - DNA, 20 bp, synthetic construct
  source 1..20: mol_type = other DNA
cggatcgctggattcagagt

SEQ ID NO: 1352 - DNA, 20 bp, synthetic construct
  source 1..20: mol_type = other DNA
tcggatcgctggattcagag

SEQ ID NO: 1353 - DNA, 20 bp, synthetic construct
  source 1..20: mol_type = other DNA
gagtccagagtgctcaccat

SEQ ID NO: 1354 - DNA, 20 bp, synthetic construct
  source 1..20: mol_type = other DNA
agagtccagagtgctcacca

SEQ ID NO: 1355 - DNA, 20 bp, synthetic construct
  source 1..20: mol_type = other DNA
cagagtccagagtgctcacc

SEQ ID NO: 1356 - DNA, 20 bp, synthetic construct
  source 1..20: mol_type = other DNA
tcagagtccagagtgctcac

SEQ ID NO: 1357 - DNA, 20 bp, synthetic construct
  source 1..20: mol_type = other DNA
ttcagagtccagagtgctca

SEQ ID NO: 1358 - DNA, 20 bp, synthetic construct
  source 1..20: mol_type = other DNA
attcagagtccagagtgctc

SEQ ID NO: 1359 - DNA, 20 bp, synthetic construct
  source 1..20: mol_type = other DNA
gattcagagtccagagtgct

SEQ ID NO: 1360 - DNA, 20 bp, synthetic construct
  source 1..20: mol_type = other DNA
ggattcagagtccagagtgc

SEQ ID NO: 1361 - DNA, 20 bp, synthetic construct
  source 1..20: mol_type = other DNA
tggattcagagtccagagtg

SEQ ID NO: 1362 - DNA, 20 bp, synthetic construct
  source 1..20: mol_type = other DNA
ctggattcagagtccagagt

SEQ ID NO: 1363 - DNA, 20 bp, synthetic construct
  source 1..20: mol_type = other DNA
gctggattcagagtccagag

SEQ ID NO: 1364 - DNA, 20 bp, synthetic construct
  source 1..20: mol_type = other DNA
cgctggattcagagtccaga

SEQ ID NO: 1365 - DNA, 20 bp, synthetic construct
  source 1..20: mol_type = other DNA
tcgctggattcagagtccag

SEQ ID NO: 1366 - DNA, 20 bp, synthetic construct
  source 1..20: mol_type = other DNA
atcgctggattcagagtcca

SEQ ID NO: 1367 - DNA, 20 bp, synthetic construct
  source 1..20: mol_type = other DNA
gatcgctggattcagagtcc

SEQ ID NO: 1368 - DNA, 20 bp, synthetic construct
  source 1..20: mol_type = other DNA
ggatcgctggattcagagtc

SEQ ID NO: 1369 - DNA, 20 bp, synthetic construct
  source 1..20: mol_type = other DNA
cggatcgctggattcagagt

SEQ ID NO: 1370 - DNA, 20 bp, synthetic construct
  source 1..20: mol_type = other DNA
tcggatcgctggattcagag

SEQ ID NO: 1371 - DNA, 20 bp, synthetic construct
  source 1..20: mol_type = other DNA
gagtccagagtgcttaccat

SEQ ID NO: 1372 - DNA, 20 bp, synthetic construct
  source 1..20: mol_type = other DNA
agagtccagagtgcttacca

SEQ ID NO: 1373 - DNA, 20 bp, synthetic construct
  source 1..20: mol_type = other DNA
cagagtccagagtgcttacc

SEQ ID NO: 1374 - DNA, 20 bp, synthetic construct
  source 1..20: mol_type = other DNA
tcagagtccagagtgcttac

SEQ ID NO: 1375 - DNA, 20 bp, synthetic construct
  source 1..20: mol_type = other DNA
ttcagagtccagagtgctta

SEQ ID NO: 1376 - DNA, 20 bp, synthetic construct
  source 1..20: mol_type = other DNA
attcagagtccagagtgctt

SEQ ID NO: 1377 - DNA, 20 bp, synthetic construct
  source 1..20: mol_type = other DNA
gattcagagtccagagtgct

SEQ ID NO: 1378 - DNA, 20 bp, synthetic construct
  source 1..20: mol_type = other DNA
ggattcagagtccagagtgc

SEQ ID NO: 1379 - DNA, 20 bp, synthetic construct
  source 1..20: mol_type = other DNA
tggattcagagtccagagtg

SEQ ID NO: 1380 - DNA, 20 bp, synthetic construct
  source 1..20: mol_type = other DNA
ctggattcagagtccagagt

SEQ ID NO: 1381 - DNA, 20 bp, synthetic construct
  source 1..20: mol_type = other DNA
gctggattcagagtccagag

SEQ ID NO: 1382 - DNA, 20 bp, synthetic construct
  source 1..20: mol_type = other DNA
cgctggattcagagtccaga

SEQ ID NO: 1383 - DNA, 20 bp, synthetic construct
  source 1..20: mol_type = other DNA
tcgctggattcagagtccag

SEQ ID NO: 1384 - DNA, 20 bp, synthetic construct
  source 1..20: mol_type = other DNA
atcgctggattcagagtcca

SEQ ID NO: 1385 - DNA, 20 bp, synthetic construct
  source 1..20: mol_type = other DNA
gatcgctggattcagagtcc

SEQ ID NO: 1386 - DNA, 20 bp, synthetic construct
  source 1..20: mol_type = other DNA
ggatcgctggattcagagtc

SEQ ID NO: 1387 - DNA, 20 bp, synthetic construct
  source 1..20: mol_type = other DNA
cggatcgctggattcagagt

SEQ ID NO: 1388 - DNA, 20 bp, synthetic construct
  source 1..20: mol_type = other DNA
tcggatcgctggattcagag

SEQ ID NO: 1389 - DNA, 20 bp, synthetic construct
  source 1..20: mol_type = other DNA
gagtccagagtgcttaccat

SEQ ID NO: 1390 - DNA, 20 bp, synthetic construct
  source 1..20: mol_type = other DNA
agagtccagagtgcttacca

SEQ ID NO: 1391 - DNA, 20 bp, synthetic construct
  source 1..20: mol_type = other DNA
cagagtccagagtgcttacc

SEQ ID NO: 1392 - DNA, 20 bp, synthetic construct
  source 1..20: mol_type = other DNA
tcagagtccagagtgcttac

SEQ ID NO: 1393 - DNA, 20 bp, synthetic construct
  source 1..20: mol_type = other DNA
ttcagagtccagagtgctta

SEQ ID NO: 1394 - DNA, 20 bp, synthetic construct
  source 1..20: mol_type = other DNA
attcagagtccagagtgctt

SEQ ID NO: 1395 - DNA, 20 bp, synthetic construct
  source 1..20: mol_type = other DNA
gattcagagtccagagtgct

SEQ ID NO: 1396 - DNA, 20 bp, synthetic construct
  source 1..20: mol_type = other DNA
ggattcagagtccagagtgc

SEQ ID NO: 1397 - DNA, 20 bp, synthetic construct
  source 1..20: mol_type = other DNA
tggattcagagtccagagtg

SEQ ID NO: 1398 - DNA, 20 bp, synthetic construct
  source 1..20: mol_type = other DNA
ctggattcagagtccagagt

SEQ ID NO: 1399 - DNA, 20 bp, synthetic construct
  source 1..20: mol_type = other DNA
gctggattcagagtccagag

SEQ ID NO: 1400 - DNA, 20 bp, synthetic construct
  source 1..20: mol_type = other DNA
cgctggattcagagtccaga

SEQ ID NO: 1401 - DNA, 20 bp, synthetic construct
  source 1..20: mol_type = other DNA
tcgctggattcagagtccag

SEQ ID NO: 1402 - DNA, 20 bp, synthetic construct
  source 1..20: mol_type = other DNA
atcgctggattcagagtcca

SEQ ID NO: 1403 - DNA, 20 bp, synthetic construct
  source 1..20: mol_type = other DNA
gatcgctggattcagagtcc

SEQ ID NO: 1404 - DNA, 20 bp, synthetic construct
  source 1..20: mol_type = other DNA
ggatcgctggattcagagtc

SEQ ID NO: 1405 - DNA, 20 bp, synthetic construct
  source 1..20: mol_type = other DNA
cggatcgctggattcagagt

SEQ ID NO: 1406 - DNA, 20 bp, synthetic construct
  source 1..20: mol_type = other DNA
tcggatcgctggattcagag

SEQ ID NO: 1407 - DNA, 20 bp, synthetic construct
  source 1..20: mol_type = other DNA
gagtccagagtgctaaccat

SEQ ID NO: 1408 - DNA, 20 bp, synthetic construct
  source 1..20: mol_type = other DNA
agagtccagagtgctaacca

SEQ ID NO: 1409 - DNA, 20 bp, synthetic construct
  source 1..20: mol_type = other DNA
cagagtccagagtgctaacc

SEQ ID NO: 1410 - DNA, 20 bp, synthetic construct
  source 1..20: mol_type = other DNA
tcagagtccagagtgctaac

SEQ ID NO: 1411 - DNA, 20 bp, synthetic construct
  source 1..20: mol_type = other DNA
ttcagagtccagagtgctaa

SEQ ID NO: 1412 - DNA, 20 bp, synthetic construct
  source 1..20: mol_type = other DNA
attcagagtccagagtgcta

SEQ ID NO: 1413 - DNA, 20 bp, synthetic construct
  source 1..20: mol_type = other DNA
gattcagagtccagagtgct

SEQ ID NO: 1414 - DNA, 20 bp, synthetic construct
  source 1..20: mol_type = other DNA
ggattcagagtccagagtgc

SEQ ID NO: 1415 - DNA, 20 bp, synthetic construct
  source 1..20: mol_type = other DNA
cggattcagagtccagagtg

SEQ ID NO: 1416 - DNA, 20 bp, synthetic construct
  source 1..20: mol_type = other DNA
ccggattcagagtccagagt

SEQ ID NO: 1417 - DNA, 20 bp, synthetic construct
  source 1..20: mol_type = other DNA
accggattcagagtccagag

SEQ ID NO: 1418 - DNA, 20 bp, synthetic construct
  source 1..20: mol_type = other DNA
taccggattcagagtccaga

SEQ ID NO: 1419 - DNA, 20 bp, synthetic construct
  source 1..20: mol_type = other DNA
ttaccggattcagagtccag

SEQ ID NO: 1420 - DNA, 20 bp, synthetic construct
  source 1..20: mol_type = other DNA
attaccggattcagagtcca

SEQ ID NO: 1421 - DNA, 20 bp, synthetic construct
  source 1..20: mol_type = other DNA
gattaccggattcagagtcc

SEQ ID NO: 1422 - DNA, 20 bp, synthetic construct
  source 1..20: mol_type = other DNA
ggattaccggattcagagtc

SEQ ID NO: 1423 - DNA, 20 bp, synthetic construct
  source 1..20: mol_type = other DNA
cggattaccggattcagagt

SEQ ID NO: 1424 - DNA, 20 bp, synthetic construct
  source 1..20: mol_type = other DNA
tcggattaccggattcagag

SEQ ID NO: 1425 - DNA, 20 bp, synthetic construct
  source 1..20: mol_type = other DNA
gagtccagagtgctgaccat

SEQ ID NO: 1426 - DNA, 20 bp, synthetic construct
  source 1..20: mol_type = other DNA
agagtccagagtgctgacca

SEQ ID NO: 1427 - DNA, 20 bp, synthetic construct
  source 1..20: mol_type = other DNA
cagagtccagagtgctgacc

SEQ ID NO: 1428 - DNA, 20 bp, synthetic construct
  source 1..20: mol_type = other DNA
tcagagtccagagtgctgac

SEQ ID NO: 1429 - DNA, 20 bp, synthetic construct
  source 1..20: mol_type = other DNA
ttcagagtccagagtgctga

SEQ ID NO: 1430 - DNA, 20 bp, synthetic construct
  source 1..20: mol_type = other DNA
attcagagtccagagtgctg

SEQ ID NO: 1431 - DNA, 20 bp, synthetic construct
  source 1..20: mol_type = other DNA
gattcagagtccagagtgct

SEQ ID NO: 1432 - DNA, 20 bp, synthetic construct
  source 1..20: mol_type = other DNA
ggattcagagtccagagtgc

SEQ ID NO: 1433 - DNA, 20 bp, synthetic construct
  source 1..20: mol_type = other DNA
tggattcagagtccagagtg

SEQ ID NO: 1434 - DNA, 20 bp, synthetic construct
  source 1..20: mol_type = other DNA
ctggattcagagtccagagt

SEQ ID NO: 1435 - DNA, 20 bp, synthetic construct
  source 1..20: mol_type = other DNA
gctggattcagagtccagag

SEQ ID NO: 1436 - DNA, 20 bp, synthetic construct
  source 1..20: mol_type = other DNA
cgctggattcagagtccaga

SEQ ID NO: 1437 - DNA, 20 bp, synthetic construct
  source 1..20: mol_type = other DNA
tcgctggattcagagtccag

SEQ ID NO: 1438 - DNA, 20 bp, synthetic construct
  source 1..20: mol_type = other DNA
atcgctggattcagagtcca

SEQ ID NO: 1439 - DNA, 20 bp, synthetic construct
  source 1..20: mol_type = other DNA
gatcgctggattcagagtcc

SEQ ID NO: 1440 - DNA, 20 bp, synthetic construct
  source 1..20: mol_type = other DNA
ggatcgctggattcagagtc

SEQ ID NO: 1441 - DNA, 20 bp, synthetic construct
  source 1..20: mol_type = other DNA
cggatcgctggattcagagt

SEQ ID NO: 1442 - DNA, 20 bp, synthetic construct
  source 1..20: mol_type = other DNA
tcggatcgctggattcagag

SEQ ID NO: 1443 - DNA, 20 bp, synthetic construct
  source 1..20: mol_type = other DNA
gagtccagagtgcttaccat

SEQ ID NO: 1444 - DNA, 20 bp, synthetic construct
  source 1..20: mol_type = other DNA
agagtccagagtgcttacca

SEQ ID NO: 1445 - DNA, 20 bp, synthetic construct
  source 1..20: mol_type = other DNA
cagagtccagagtgcttacc

SEQ ID NO: 1446 - DNA, 20 bp, synthetic construct
  source 1..20: mol_type = other DNA
tcagagtccagagtgcttac

SEQ ID NO: 1447 - DNA, 20 bp, synthetic construct
  source 1..20: mol_type = other DNA
ttcagagtccagagtgctta

SEQ ID NO: 1448 - DNA, 20 bp, synthetic construct
  source 1..20: mol_type = other DNA
attcagagtccagagtgctt

SEQ ID NO: 1449 - DNA, 20 bp, synthetic construct
  source 1..20: mol_type = other DNA
gattcagagtccagagtgct

SEQ ID NO: 1450 - DNA, 20 bp, synthetic construct
  source 1..20: mol_type = other DNA
ggattcagagtccagagtgc

SEQ ID NO: 1451 - DNA, 20 bp, synthetic construct
  source 1..20: mol_type = other DNA
tggattcagagtccagagtg

SEQ ID NO: 1452 - DNA, 20 bp, synthetic construct
  source 1..20: mol_type = other DNA
ctggattcagagtccagagt

SEQ ID NO: 1453 - DNA, 20 bp, synthetic construct
  source 1..20: mol_type = other DNA
gctggattcagagtccagag

SEQ ID NO: 1454 - DNA, 20 bp, synthetic construct
  source 1..20: mol_type = other DNA
ggctggattcagagtccaga

SEQ ID NO: 1455 - DNA, 20 bp, synthetic construct
  source 1..20: mol_type = other DNA
tggctggattcagagtccag

SEQ ID NO: 1456 - DNA, 20 bp, synthetic construct
  source 1..20: mol_type = other DNA
atggctggattcagagtcca

SEQ ID NO: 1457 - DNA, 20 bp, synthetic construct
  source 1..20: mol_type = other DNA
gatggctggattcagagtcc

SEQ ID NO: 1458 - DNA, 20 bp, synthetic construct
  source 1..20: mol_type = other DNA
agatggctggattcagagtc

SEQ ID NO: 1459 - DNA, 20 bp, synthetic construct
  source 1..20: mol_type = other DNA
cagatggctggattcagagt

SEQ ID NO: 1460 - DNA, 20 bp, synthetic construct
  source 1..20: mol_type = other DNA
tcagatggctggattcagag

SEQ ID NO: 1461 - DNA, 20 bp, synthetic construct
  source 1..20: mol_type = other DNA
aagtccagagtgctaaccat

SEQ ID NO: 1462 - DNA, 20 bp, synthetic construct
  source 1..20: mol_type = other DNA
aaagtccagagtgctaacca

SEQ ID NO: 1463 - DNA, 20 bp, synthetic construct
  source 1..20: mol_type = other DNA
caaagtccagagtgctaacc

SEQ ID NO: 1464 - DNA, 20 bp, synthetic construct
  source 1..20: mol_type = other DNA
tcaaagtccagagtgctaac

SEQ ID NO: 1465 - DNA, 20 bp, synthetic construct
  source 1..20: mol_type = other DNA
ttcaaagtccagagtgctaa

SEQ ID NO: 1466 - DNA, 20 bp, synthetic construct
  source 1..20: mol_type = other DNA
attcaaagtccagagtgcta

SEQ ID NO: 1467 - DNA, 20 bp, synthetic construct
  source 1..20: mol_type = other DNA
gattcaaagtccagagtgct

SEQ ID NO: 1468 - DNA, 20 bp, synthetic construct
  source 1..20: mol_type = other DNA
ggattcaaagtccagagtgc

SEQ ID NO: 1469 - DNA, 20 bp, synthetic construct
  source 1..20: mol_type = other DNA
tggattcaaagtccagagtg

SEQ ID NO: 1470 - DNA, 20 bp, synthetic construct
  source 1..20: mol_type = other DNA
ctggattcaaagtccagagt

SEQ ID NO: 1471 - DNA, 20 bp, synthetic construct
  source 1..20: mol_type = other DNA
gctggattcaaagtccagag

SEQ ID NO: 1472 - DNA, 20 bp, synthetic construct
  source 1..20: mol_type = other DNA
cgctggattcaaagtccaga

SEQ ID NO: 1473 - DNA, 20 bp, synthetic construct
  source 1..20: mol_type = other DNA
tcgctggattcaaagtccag

SEQ ID NO: 1474 - DNA, 20 bp, synthetic construct
  source 1..20: mol_type = other DNA
atcgctggattcaaagtcca

SEQ ID NO: 1475 - DNA, 20 bp, synthetic construct
  source 1..20: mol_type = other DNA
gatcgctggattcaaagtcc

SEQ ID NO: 1476 - DNA, 20 bp, synthetic construct
  source 1..20: mol_type = other DNA
ggatcgctggattcaaagtc

SEQ ID NO: 1477 - DNA, 20 bp, synthetic construct
  source 1..20: mol_type = other DNA
cggatcgctggattcaaagt

SEQ ID NO: 1478 - DNA, 20 bp, synthetic construct
  source 1..20: mol_type = other DNA
tcggatcgctggattcaaag

SEQ ID NO: 1479 - DNA, 20 bp, synthetic construct
  source 1..20: mol_type = other DNA
aagtccagagtgctaaccat

SEQ ID NO: 1480 - DNA, 20 bp, synthetic construct
  source 1..20: mol_type = other DNA
aaagtccagagtgctaacca

SEQ ID NO: 1481 - DNA, 20 bp, synthetic construct
  source 1..20: mol_type = other DNA
caaagtccagagtgctaacc

SEQ ID NO: 1482 - DNA, 20 bp, synthetic construct
  source 1..20: mol_type = other DNA
tcaaagtccagagtgctaac

SEQ ID NO: 1483 - DNA, 20 bp, synthetic construct
  source 1..20: mol_type = other DNA
ttcaaagtccagagtgctaa

SEQ ID NO: 1484 - DNA, 20 bp, synthetic construct
  source 1..20: mol_type = other DNA
attcaaagtccagagtgcta

SEQ ID NO: 1485 - DNA, 20 bp, synthetic construct
  source 1..20: mol_type = other DNA
gattcaaagtccagagtgct

SEQ ID NO: 1486 - DNA, 20 bp, synthetic construct
  source 1..20: mol_type = other DNA
ggattcaaagtccagagtgc

SEQ ID NO: 1487 - DNA, 20 bp, synthetic construct
  source 1..20: mol_type = other DNA
tggattcaaagtccagagtg

SEQ ID NO: 1488 - DNA, 20 bp, synthetic construct
  source 1..20: mol_type = other DNA
ctggattcaaagtccagagt

SEQ ID NO: 1489 - DNA, 20 bp, synthetic construct
  source 1..20: mol_type = other DNA
gctggattcaaagtccagag

SEQ ID NO: 1490 - DNA, 20 bp, synthetic construct
  source 1..20: mol_type = other DNA
tgctggattcaaagtccaga

SEQ ID NO: 1491 - DNA, 20 bp, synthetic construct
  source 1..20: mol_type = other DNA
ttgctggattcaaagtccag

SEQ ID NO: 1492 - DNA, 20 bp, synthetic construct
  source 1..20: mol_type = other DNA
attgctggattcaaagtcca

SEQ ID NO: 1493 - DNA, 20 bp, synthetic construct
  source 1..20: mol_type = other DNA
gattgctggattcaaagtcc

SEQ ID NO: 1494 - DNA, 20 bp, synthetic construct
  source 1..20: mol_type = other DNA
ggattgctggattcaaagtc

SEQ ID NO: 1495 - DNA, 20 bp, synthetic construct
  source 1..20: mol_type = other DNA
cggattgctggattcaaagt

SEQ ID NO: 1496 - DNA, 20 bp, synthetic construct
  source 1..20: mol_type = other DNA
tcggattgctggattcaaag

SEQ ID NO: 1497 - DNA, 20 bp, synthetic construct
  source 1..20: mol_type = other DNA
aagtccagagtgctaaccat

SEQ ID NO: 1498 - DNA, 20 bp, synthetic construct
  source 1..20: mol_type = other DNA
aaagtccagagtgctaacca

SEQ ID NO: 1499 - DNA, 20 bp, synthetic construct
  source 1..20: mol_type = other DNA
caaagtccagagtgctaacc

SEQ ID NO: 1500 - DNA, 20 bp, synthetic construct
  source 1..20: mol_type = other DNA
tcaaagtccagagtgctaac

SEQ ID NO: 1501 - DNA, 20 bp, synthetic construct
  source 1..20: mol_type = other DNA
ttcaaagtccagagtgctaa

SEQ ID NO: 1502 - DNA, 20 bp, synthetic construct
  source 1..20: mol_type = other DNA
attcaaagtccagagtgcta

SEQ ID NO: 1503 - DNA, 20 bp, synthetic construct
  source 1..20: mol_type = other DNA
gattcaaagtccagagtgct

SEQ ID NO: 1504 - DNA, 20 bp, synthetic construct
  source 1..20: mol_type = other DNA
ggattcaaagtccagagtgc

SEQ ID NO: 1505 - DNA, 20 bp, synthetic construct
  source 1..20: mol_type = other DNA
tggattcaaagtccagagtg

SEQ ID NO: 1506 - DNA, 20 bp, synthetic construct
  source 1..20: mol_type = other DNA
ctggattcaaagtccagagt

SEQ ID NO: 1507 - DNA, 20 bp, synthetic construct
  source 1..20: mol_type = other DNA
gctggattcaaagtccagag

SEQ ID NO: 1508 - DNA, 20 bp, synthetic construct
  source 1..20: mol_type = other DNA
cgctggattcaaagtccaga

SEQ ID NO: 1509 - DNA, 20 bp, synthetic construct
  source 1..20: mol_type = other DNA
tcgctggattcaaagtccag

SEQ ID NO: 1510 - DNA, 20 bp, synthetic construct
  source 1..20: mol_type = other DNA
atcgctggattcaaagtcca

SEQ ID NO: 1511 - DNA, 20 bp, synthetic construct
  source 1..20: mol_type = other DNA
gatcgctggattcaaagtcc

SEQ ID NO: 1512 - DNA, 20 bp, synthetic construct
  source 1..20: mol_type = other DNA
ggatcgctggattcaaagtc

SEQ ID NO: 1513 - DNA, 20 bp, synthetic construct
  source 1..20: mol_type = other DNA
cggatcgctggattcaaagt

SEQ ID NO: 1514 - DNA, 20 bp, synthetic construct
  source 1..20: mol_type = other DNA
tcggatcgctggattcaaag

SEQ ID NO: 1515 - DNA, 20 bp, synthetic construct
  source 1..20: mol_type = other DNA
aagtccagagtgctaaccat

SEQ ID NO: 1516 - DNA, 20 bp, synthetic construct
  source 1..20: mol_type = other DNA
aaagtccagagtgctaacca

SEQ ID NO: 1517 - DNA, 20 bp, synthetic construct
  source 1..20: mol_type = other DNA
caaagtccagagtgctaacc

SEQ ID NO: 1518 - DNA, 20 bp, synthetic construct
  source 1..20: mol_type = other DNA
tcaaagtccagagtgctaac

SEQ ID NO: 1519 - DNA, 20 bp, synthetic construct
  source 1..20: mol_type = other DNA
ttcaaagtccagagtgctaa

SEQ ID NO: 1520 - DNA, 20 bp, synthetic construct
  source 1..20: mol_type = other DNA
attcaaagtccagagtgcta

SEQ ID NO: 1521 - DNA, 20 bp, synthetic construct
  source 1..20: mol_type = other DNA
gattcaaagtccagagtgct

SEQ ID NO: 1522 - DNA, 20 bp, synthetic construct
  source 1..20: mol_type = other DNA
ggattcaaagtccagagtgc

SEQ ID NO: 1523 - DNA, 20 bp, synthetic construct
  source 1..20: mol_type = other DNA
tggattcaaagtccagagtg

SEQ ID NO: 1524 - DNA, 20 bp, synthetic construct
  source 1..20: mol_type = other DNA
ctggattcaaagtccagagt

SEQ ID NO: 1525 - DNA, 20 bp, synthetic construct
  source 1..20: mol_type = other DNA
gctggattcaaagtccagag

SEQ ID NO: 1526 - DNA, 20 bp, synthetic construct
  source 1..20: mol_type = other DNA
cgctggattcaaagtccaga

SEQ ID NO: 1527 - DNA, 20 bp, synthetic construct
  source 1..20: mol_type = other DNA
tcgctggattcaaagtccag

SEQ ID NO: 1528 - DNA, 20 bp, synthetic construct
  source 1..20: mol_type = other DNA
atcgctggattcaaagtcca

SEQ ID NO: 1529 - DNA, 20 bp, synthetic construct
  source 1..20: mol_type = other DNA
gatcgctggattcaaagtcc

SEQ ID NO: 1530 - DNA, 20 bp, synthetic construct
  source 1..20: mol_type = other DNA
ggatcgctggattcaaagtc

SEQ ID NO: 1531 - DNA, 20 bp, synthetic construct
  source 1..20: mol_type = other DNA
cggatcgctggattcaaagt

SEQ ID NO: 1532 - DNA, 20 bp, synthetic construct
  source 1..20: mol_type = other DNA
tcggatcgctggattcaaag

SEQ ID NO: 1533 - DNA, 20 bp, synthetic construct
  source 1..20: mol_type = other DNA
aagtccagagtgctaaccat

SEQ ID NO: 1534 - DNA, 20 bp, synthetic construct
  source 1..20: mol_type = other DNA
aaagtccagagtgctaacca

SEQ ID NO: 1535 - DNA, 20 bp, synthetic construct
  source 1..20: mol_type = other DNA
caaagtccagagtgctaacc

SEQ ID NO: 1536 - DNA, 20 bp, synthetic construct
  source 1..20: mol_type = other DNA
tcaaagtccagagtgctaac

SEQ ID NO: 1537 - DNA, 20 bp, synthetic construct
  source 1..20: mol_type = other DNA
ttcaaagtccagagtgctaa

SEQ ID NO: 1538 - DNA, 20 bp, synthetic construct
  source 1..20: mol_type = other DNA
attcaaagtccagagtgcta

SEQ ID NO: 1539 - DNA, 20 bp, synthetic construct
  source 1..20: mol_type = other DNA
gattcaaagtccagagtgct

SEQ ID NO: 1540 - DNA, 20 bp, synthetic construct
  source 1..20: mol_type = other DNA
ggattcaaagtccagagtgc

SEQ ID NO: 1541 - DNA, 20 bp, synthetic construct
  source 1..20: mol_type = other DNA
tggattcaaagtccagagtg

SEQ ID NO: 1542 - DNA, 20 bp, synthetic construct
  source 1..20: mol_type = other DNA
ctggattcaaagtccagagt

SEQ ID NO: 1543 - DNA, 20 bp, synthetic construct
  source 1..20: mol_type = other DNA
gctggattcaaagtccagag

SEQ ID NO: 1544 - DNA, 20 bp, synthetic construct
  source 1..20: mol_type = other DNA
cgctggattcaaagtccaga

SEQ ID NO: 1545 - DNA, 20 bp, synthetic construct
  source 1..20: mol_type = other DNA
tcgctggattcaaagtccag

SEQ ID NO: 1546 - DNA, 20 bp, synthetic construct
  source 1..20: mol_type = other DNA
atcgctggattcaaagtcca

SEQ ID NO: 1547 - DNA, 20 bp, synthetic construct
  source 1..20: mol_type = other DNA
gatcgctggattcaaagtcc

SEQ ID NO: 1548 - DNA, 20 bp, synthetic construct
  source 1..20: mol_type = other DNA
ggatcgctggattcaaagtc

SEQ ID NO: 1549 - DNA, 20 bp, synthetic construct
  source 1..20: mol_type = other DNA
cggatcgctggattcaaagt

SEQ ID NO: 1550 - DNA, 20 bp, synthetic construct
  source 1..20: mol_type = other DNA
tcggatcgctggattcaaag

SEQ ID NO: 1551 - DNA, 20 bp, synthetic construct
  source 1..20: mol_type = other DNA
aagcccagagtgctaaccat

SEQ ID NO: 1552 - DNA, 20 bp, synthetic construct
  source 1..20: mol_type = other DNA
aaagcccagagtgctaacca

SEQ ID NO: 1553 - DNA, 20 bp, synthetic construct
  source 1..20: mol_type = other DNA
caaagcccagagtgctaacc

SEQ ID NO: 1554 - DNA, 20 bp, synthetic construct
  source 1..20: mol_type = other DNA
tcaaagcccagagtgctaac

SEQ ID NO: 1555 - DNA, 20 bp, synthetic construct
  source 1..20: mol_type = other DNA
ttcaaagcccagagtgctaa

SEQ ID NO: 1556 - DNA, 20 bp, synthetic construct
  source 1..20: mol_type = other DNA
attcaaagcccagagtgcta

SEQ ID NO: 1557 - DNA, 20 bp, synthetic construct
  source 1..20: mol_type = other DNA
gattcaaagcccagagtgct

SEQ ID NO: 1558 - DNA, 20 bp, synthetic construct
  source 1..20: mol_type = other DNA
ggattcaaagcccagagtgc

SEQ ID NO: 1559 - DNA, 20 bp, synthetic construct
  source 1..20: mol_type = other DNA
tggattcaaagcccagagtg

SEQ ID NO: 1560 - DNA, 20 bp, synthetic construct
  source 1..20: mol_type = other DNA
ctggattcaaagcccagagt

SEQ ID NO: 1561 - DNA, 20 bp, synthetic construct
  source 1..20: mol_type = other DNA
gctggattcaaagcccagag

SEQ ID NO: 1562 - DNA, 20 bp, synthetic construct
  source 1..20: mol_type = other DNA
tgctggattcaaagcccaga

SEQ ID NO: 1563 - DNA, 20 bp, synthetic construct
  source 1..20: mol_type = other DNA
ttgctggattcaaagcccag

SEQ ID NO: 1564 - DNA, 20 bp, synthetic construct
  source 1..20: mol_type = other DNA
attgctggattcaaagccca

SEQ ID NO: 1565 - DNA, 20 bp, synthetic construct
  source 1..20: mol_type = other DNA
gattgctggattcaaagccc

SEQ ID NO: 1566 - DNA, 20 bp, synthetic construct
  source 1..20: mol_type = other DNA
ggattgctggattcaaagcc

SEQ ID NO: 1567 - DNA, 20 bp, synthetic construct
  source 1..20: mol_type = other DNA
cggattgctggattcaaagc

SEQ ID NO: 1568 - DNA, 20 bp, synthetic construct
  source 1..20: mol_type = other DNA
tcggattgctggattcaaag

SEQ ID NO: 1569 - DNA, 20 bp, synthetic construct
  source 1..20: mol_type = other DNA
gtggttaggattcggcgctc

SEQ ID NO: 1570 - DNA, 20 bp, synthetic construct
  source 1..20: mol_type = other DNA
tggttaggattcggcgctct

SEQ ID NO: 1571 - DNA, 20 bp, synthetic construct
  source 1..20: mol_type = other DNA
ggttaggattcggcgctctc

SEQ ID NO: 1572 - DNA, 20 bp, synthetic construct
  source 1..20: mol_type = other DNA
gttaggattcggcgctctca

SEQ ID NO: 1573 - DNA, 20 bp, synthetic construct
  source 1..20: mol_type = other DNA
ttaggattcggcgctctcac

SEQ ID NO: 1574 - DNA, 20 bp, synthetic construct
  source 1..20: mol_type = other DNA
taggattcggcgctctcacc

SEQ ID NO: 1575 - DNA, 20 bp, synthetic construct
  source 1..20: mol_type = other DNA
aggattcggcgctctcaccg

SEQ ID NO: 1576 - DNA, 20 bp, synthetic construct
  source 1..20: mol_type = other DNA
ggattcggcgctctcaccgc

SEQ ID NO: 1577 - DNA, 20 bp, synthetic construct
  source 1..20: mol_type = other DNA
gattcggcgctctcaccgcc

SEQ ID NO: 1578 - DNA, 20 bp, synthetic construct
  source 1..20: mol_type = other DNA
attcggcgctctcaccgccg

SEQ ID NO: 1579 - DNA, 20 bp, synthetic construct
  source 1..20: mol_type = other DNA
ttcggcgctctcaccgccgc

SEQ ID NO: 1580 - DNA, 20 bp, synthetic construct
  source 1..20: mol_type = other DNA
tcggcgctctcaccgccgcg

SEQ ID NO: 1581 - DNA, 20 bp, synthetic construct
  source 1..20: mol_type = other DNA
cggcgctctcaccgccgcgg

SEQ ID NO: 1582 - DNA, 20 bp, synthetic construct
  source 1..20: mol_type = other DNA
ggcgctctcaccgccgcggc

SEQ ID NO: 1583 - DNA, 20 bp, synthetic construct
  source 1..20: mol_type = other DNA
gcgctctcaccgccgcggcc

SEQ ID NO: 1584 - DNA, 20 bp, synthetic construct
  source 1..20: mol_type = other DNA
cgctctcaccgccgcggccc

SEQ ID NO: 1585 - DNA, 20 bp, synthetic construct
  source 1..20: mol_type = other DNA
gctctcaccgccgcggcccg

SEQ ID NO: 1586 - DNA, 20 bp, synthetic construct
  source 1..20: mol_type = other DNA
ctctcaccgccgcggcccgg

SEQ ID NO: 1587 - DNA, 20 bp, synthetic construct
  source 1..20: mol_type = other DNA
gtggttaggattcggcgctc

SEQ ID NO: 1588 - DNA, 20 bp, synthetic construct
  source 1..20: mol_type = other DNA
tggttaggattcggcgctct

SEQ ID NO: 1589 - DNA, 20 bp, synthetic construct
  source 1..20: mol_type = other DNA
ggttaggattcggcgctctc

SEQ ID NO: 1590 - DNA, 20 bp, synthetic construct
  source 1..20: mol_type = other DNA
gttaggattcggcgctctca

SEQ ID NO: 1591 - DNA, 20 bp, synthetic construct
  source 1..20: mol_type = other DNA
ttaggattcggcgctctcac

SEQ ID NO: 1592 - DNA, 20 bp, synthetic construct
  source 1..20: mol_type = other DNA
taggattcggcgctctcacc

SEQ ID NO: 1593 - DNA, 20 bp, synthetic construct
  source 1..20: mol_type = other DNA
aggattcggcgctctcaccg

SEQ ID NO: 1594 - DNA, 20 bp, synthetic construct
  source 1..20: mol_type = other DNA
ggattcggcgctctcaccgc

SEQ ID NO: 1595 - DNA, 20 bp, synthetic construct
  source 1..20: mol_type = other DNA
gattcggcgctctcaccgcc

SEQ ID NO: 1596 - DNA, 20 bp, synthetic construct
  source 1..20: mol_type = other DNA
attcggcgctctcaccgccg

SEQ ID NO: 1597 - DNA, 20 bp, synthetic construct
  source 1..20: mol_type = other DNA
ttcggcgctctcaccgccgc

SEQ ID NO: 1598 - DNA, 20 bp, synthetic construct
  source 1..20: mol_type = other DNA
tcggcgctctcaccgccgcg

SEQ ID NO: 1599 - DNA, 20 bp, synthetic construct
  source 1..20: mol_type = other DNA
cggcgctctcaccgccgcgg

SEQ ID NO: 1600 - DNA, 20 bp, synthetic construct
  source 1..20: mol_type = other DNA
ggcgctctcaccgccgcggc

SEQ ID NO: 1601 - DNA, 20 bp, synthetic construct
  source 1..20: mol_type = other DNA
gcgctctcaccgccgcggcc

SEQ ID NO: 1602 - DNA, 20 bp, synthetic construct
  source 1..20: mol_type = other DNA
cgctctcaccgccgcggccc

SEQ ID NO: 1603 - DNA, 20 bp, synthetic construct
  source 1..20: mol_type = other DNA
gctctcaccgccgcggcccg

SEQ ID NO: 1604 - DNA, 20 bp, synthetic construct
  source 1..20: mol_type = other DNA
ctctcaccgccgcggcccgg

SEQ ID NO: 1605 - DNA, 20 bp, synthetic construct
  source 1..20: mol_type = other DNA
gtggttaggattcggcgctc

SEQ ID NO: 1606 - DNA, 20 bp, synthetic construct
  source 1..20: mol_type = other DNA
tggttaggattcggcgctct

SEQ ID NO: 1607 - DNA, 20 bp, synthetic construct
  source 1..20: mol_type = other DNA
ggttaggattcggcgctctc

SEQ ID NO: 1608 - DNA, 20 bp, synthetic construct
  source 1..20: mol_type = other DNA
gttaggattcggcgctctca

SEQ ID NO: 1609 - DNA, 20 bp, synthetic construct
  source 1..20: mol_type = other DNA
ttaggattcggcgctctcac

SEQ ID NO: 1610 - DNA, 20 bp, synthetic construct
  source 1..20: mol_type = other DNA
taggattcggcgctctcacc

SEQ ID NO: 1611 - DNA, 20 bp, synthetic construct
  source 1..20: mol_type = other DNA
aggattcggcgctctcaccg

SEQ ID NO: 1612 - DNA, 20 bp, synthetic construct
  source 1..20: mol_type = other DNA
ggattcggcgctctcaccgc

SEQ ID NO: 1613 - DNA, 20 bp, synthetic construct
  source 1..20: mol_type = other DNA
gattcggcgctctcaccgcc

SEQ ID NO: 1614 - DNA, 20 bp, synthetic construct
  source 1..20: mol_type = other DNA
attcggcgctctcaccgccg

SEQ ID NO: 1615 - DNA, 20 bp, synthetic construct
  source 1..20: mol_type = other DNA
ttcggcgctctcaccgccgc

SEQ ID NO: 1616 - DNA, 20 bp, synthetic construct
  source 1..20: mol_type = other DNA
tcggcgctctcaccgccgcg

SEQ ID NO: 1617 - DNA, 20 bp, synthetic construct
  source 1..20: mol_type = other DNA
cggcgctctcaccgccgcgg

SEQ ID NO: 1618 - DNA, 20 bp, synthetic construct
  source 1..20: mol_type = other DNA
ggcgctctcaccgccgcggc

SEQ ID NO: 1619 - DNA, 20 bp, synthetic construct
  source 1..20: mol_type = other DNA
gcgctctcaccgccgcggcc

SEQ ID NO: 1620 - DNA, 20 bp, synthetic construct
  source 1..20: mol_type = other DNA
cgctctcaccgccgcggccc

SEQ ID NO: 1621 - DNA, 20 bp, synthetic construct
  source 1..20: mol_type = other DNA
gctctcaccgccgcggcccg

SEQ ID NO: 1622 - DNA, 20 bp, synthetic construct
  source 1..20: mol_type = other DNA
ctctcaccgccgcggcccgg

SEQ ID NO: 1623 - DNA, 20 bp, synthetic construct
  source 1..20: mol_type = other DNA
gtggttaggattcggcgctc

SEQ ID NO: 1624 - DNA, 20 bp, synthetic construct
  source 1..20: mol_type = other DNA
tggttaggattcggcgctct

SEQ ID NO: 1625 - DNA, 20 bp, synthetic construct
  source 1..20: mol_type = other DNA
ggttaggattcggcgctctc

SEQ ID NO: 1626 - DNA, 20 bp, synthetic construct
  source 1..20: mol_type = other DNA
gttaggattcggcgctctca

SEQ ID NO: 1627 - DNA, 20 bp, synthetic construct
  source 1..20: mol_type = other DNA
ttaggattcggcgctctcac

SEQ ID NO: 1628 - DNA, 20 bp, synthetic construct
  source 1..20: mol_type = other DNA
taggattcggcgctctcacc

SEQ ID NO: 1629 - DNA, 20 bp, synthetic construct
  source 1..20: mol_type = other DNA
aggattcggcgctctcaccg

SEQ ID NO: 1630 - DNA, 20 bp, synthetic construct
  source 1..20: mol_type = other DNA
ggattcggcgctctcaccgc

SEQ ID NO: 1631 - DNA, 20 bp, synthetic construct
  source 1..20: mol_type = other DNA
gattcggcgctctcaccgcc

SEQ ID NO: 1632 - DNA, 20 bp, synthetic construct
  source 1..20: mol_type = other DNA
attcggcgctctcaccgccg

SEQ ID NO: 1633 - DNA, 20 bp, synthetic construct
  source 1..20: mol_type = other DNA
ttcggcgctctcaccgccgc

SEQ ID NO: 1634 - DNA, 20 bp, synthetic construct
  source 1..20: mol_type = other DNA
tcggcgctctcaccgccgcg

SEQ ID NO: 1635 - DNA, 20 bp, synthetic construct
  source 1..20: mol_type = other DNA
cggcgctctcaccgccgcgg

SEQ ID NO: 1636 - DNA, 20 bp, synthetic construct
  source 1..20: mol_type = other DNA
ggcgctctcaccgccgcggc

SEQ ID NO: 1637 - DNA, 20 bp, synthetic construct
  source 1..20: mol_type = other DNA
gcgctctcaccgccgcggcc

SEQ ID NO: 1638 - DNA, 20 bp, synthetic construct
  source 1..20: mol_type = other DNA
cgctctcaccgccgcggccc

SEQ ID NO: 1639 - DNA, 20 bp, synthetic construct
  source 1..20: mol_type = other DNA
gctctcaccgccgcggcccg

SEQ ID NO: 1640 - DNA, 20 bp, synthetic construct
  source 1..20: mol_type = other DNA
ctctcaccgccgcggcccgg

SEQ ID NO: 1641 - DNA, 20 bp, synthetic construct
  source 1..20: mol_type = other DNA
gtggttaggattcggcgctc

SEQ ID NO: 1642 - DNA, 20 bp, synthetic construct
  source 1..20: mol_type = other DNA
tggttaggattcggcgctct

SEQ ID NO: 1643 - DNA, 20 bp, synthetic construct
  source 1..20: mol_type = other DNA
ggttaggattcggcgctctc

SEQ ID NO: 1644 - DNA, 20 bp, synthetic construct
  source 1..20: mol_type = other DNA
gttaggattcggcgctctca

SEQ ID NO: 1645 - DNA, 20 bp, synthetic construct
  source 1..20: mol_type = other DNA
ttaggattcggcgctctcac

SEQ ID NO: 1646 - DNA, 20 bp, synthetic construct
  source 1..20: mol_type = other DNA
taggattcggcgctctcacc

SEQ ID NO: 1647 - DNA, 20 bp, synthetic construct
  source 1..20: mol_type = other DNA
aggattcggcgctctcaccg

SEQ ID NO: 1648 - DNA, 20 bp, synthetic construct
  source 1..20: mol_type = other DNA
ggattcggcgctctcaccgc

SEQ ID NO: 1649 - DNA, 20 bp, synthetic construct
  source 1..20: mol_type = other DNA
gattcggcgctctcaccgcc

SEQ ID NO: 1650 - DNA, 20 bp, synthetic construct
  source 1..20: mol_type = other DNA
attcggcgctctcaccgccg

SEQ ID NO: 1651 - DNA, 20 bp, synthetic construct
  source 1..20: mol_type = other DNA
ttcggcgctctcaccgccgc

SEQ ID NO: 1652 - DNA, 20 bp, synthetic construct
  source 1..20: mol_type = other DNA
tcggcgctctcaccgccgcg

SEQ ID NO: 1653 - DNA, 20 bp, synthetic construct
  source 1..20: mol_type = other DNA
cggcgctctcaccgccgcgg

SEQ ID NO: 1654 - DNA, 20 bp, synthetic construct
  source 1..20: mol_type = other DNA
ggcgctctcaccgccgcggc

SEQ ID NO: 1655 - DNA, 20 bp, synthetic construct
  source 1..20: mol_type = other DNA
gcgctctcaccgccgcggcc

SEQ ID NO: 1656 - DNA, 20 bp, synthetic construct
  source 1..20: mol_type = other DNA
cgctctcaccgccgcggccc

SEQ ID NO: 1657 - DNA, 20 bp, synthetic construct
  source 1..20: mol_type = other DNA
gctctcaccgccgcggcccg

SEQ ID NO: 1658 - DNA, 20 bp, synthetic construct
  source 1..20: mol_type = other DNA
ctctcaccgccgcggcccgg

SEQ ID NO: 1659 - DNA, 20 bp, synthetic construct
  source 1..20: mol_type = other DNA
gtggttaggattcggcgctc

SEQ ID NO: 1660 - DNA, 20 bp, synthetic construct
  source 1..20: mol_type = other DNA
tggttaggattcggcgctct

SEQ ID NO: 1661 - DNA, 20 bp, synthetic construct
  source 1..20: mol_type = other DNA
ggttaggattcggcgctctc

SEQ ID NO: 1662 - DNA, 20 bp, synthetic construct
  source 1..20: mol_type = other DNA
gttaggattcggcgctctca

SEQ ID NO: 1663 - DNA, 20 bp, synthetic construct
  source 1..20: mol_type = other DNA
ttaggattcggcgctctcac

SEQ ID NO: 1664 - DNA, 20 bp, synthetic construct
  source 1..20: mol_type = other DNA
taggattcggcgctctcacc

SEQ ID NO: 1665 - DNA, 20 bp, synthetic construct
  source 1..20: mol_type = other DNA
aggattcggcgctctcaccg

SEQ ID NO: 1666 - DNA, 20 bp, synthetic construct
  source 1..20: mol_type = other DNA
ggattcggcgctctcaccgc

SEQ ID NO: 1667 - DNA, 20 bp, synthetic construct
  source 1..20: mol_type = other DNA
gattcggcgctctcaccgcc

SEQ ID NO: 1668 - DNA, 20 bp, synthetic construct
  source 1..20: mol_type = other DNA
attcggcgctctcaccgccg

SEQ ID NO: 1669 - DNA, 20 bp, synthetic construct
  source 1..20: mol_type = other DNA
ttcggcgctctcaccgccgc

SEQ ID NO: 1670 - DNA, 20 bp, synthetic construct
  source 1..20: mol_type = other DNA
tcggcgctctcaccgccgcg

SEQ ID NO: 1671 - DNA, 20 bp, synthetic construct
  source 1..20: mol_type = other DNA
cggcgctctcaccgccgcgg

SEQ ID NO: 1672 - DNA, 20 bp, synthetic construct
  source 1..20: mol_type = other DNA
ggcgctctcaccgccgcggc

SEQ ID NO: 1673 - DNA, 20 bp, synthetic construct
  source 1..20: mol_type = other DNA
gcgctctcaccgccgcggcc

SEQ ID NO: 1674 - DNA, 20 bp, synthetic construct
  source 1..20: mol_type = other DNA
cgctctcaccgccgcggccc

SEQ ID NO: 1675 - DNA, 20 bp, synthetic construct
  source 1..20: mol_type = other DNA
gctctcaccgccgcggcccg

SEQ ID NO: 1676 - DNA, 20 bp, synthetic construct
  source 1..20: mol_type = other DNA
ctctcaccgccgcggcccgg

SEQ ID NO: 1677 - DNA, 20 bp, synthetic construct
  source 1..20: mol_type = other DNA
gtggttaggattcggcgctc

SEQ ID NO: 1678 - DNA, 20 bp, synthetic construct
  source 1..20: mol_type = other DNA
tggttaggattcggcgctct

SEQ ID NO: 1679 - DNA, 20 bp, synthetic construct
  source 1..20: mol_type = other DNA
ggttaggattcggcgctctc

SEQ ID NO: 1680 - DNA, 20 bp, synthetic construct
  source 1..20: mol_type = other DNA
gttaggattcggcgctctca

SEQ ID NO: 1681 - DNA, 20 bp, synthetic construct
  source 1..20: mol_type = other DNA
ttaggattcggcgctctcac

SEQ ID NO: 1682 - DNA, 20 bp, synthetic construct
  source 1..20: mol_type = other DNA
taggattcggcgctctcacc

SEQ ID NO: 1683 - DNA, 20 bp, synthetic construct
  source 1..20: mol_type = other DNA
aggattcggcgctctcaccg

SEQ ID NO: 1684 - DNA, 20 bp, synthetic construct
  source 1..20: mol_type = other DNA
ggattcggcgctctcaccgc

SEQ ID NO: 1685 - DNA, 20 bp, synthetic construct
  source 1..20: mol_type = other DNA
gattcggcgctctcaccgcc

SEQ ID NO: 1686 - DNA, 20 bp, synthetic construct
  source 1..20: mol_type = other DNA
attcggcgctctcaccgccg

SEQ ID NO: 1687 - DNA, 20 bp, synthetic construct
  source 1..20: mol_type = other DNA
ttcggcgctctcaccgccgc

SEQ ID NO: 1688 - DNA, 20 bp, synthetic construct
  source 1..20: mol_type = other DNA
tcggcgctctcaccgccgcg

SEQ ID NO: 1689 - DNA, 20 bp, synthetic construct
  source 1..20: mol_type = other DNA
cggcgctctcaccgccgcgg

SEQ ID NO: 1690 - DNA, 20 bp, synthetic construct
  source 1..20: mol_type = other DNA
ggcgctctcaccgccgcggc

SEQ ID NO: 1691 - DNA, 20 bp, synthetic construct
  source 1..20: mol_type = other DNA
gcgctctcaccgccgcggcc

SEQ ID NO: 1692 - DNA, 20 bp, synthetic construct
  source 1..20: mol_type = other DNA
cgctctcaccgccgcggccc

SEQ ID NO: 1693 - DNA, 20 bp, synthetic construct
  source 1..20: mol_type = other DNA
gctctcaccgccgcggcccg

SEQ ID NO: 1694 - DNA, 20 bp, synthetic construct
  source 1..20: mol_type = other DNA
ctctcaccgccgcggcccgg

SEQ ID NO: 1695 - DNA, 20 bp, synthetic construct
  source 1..20: mol_type = other DNA
gtggttaggattcggcgctc

SEQ ID NO: 1696 - DNA, 20 bp, synthetic construct
  source 1..20: mol_type = other DNA
tggttaggattcggcgctct

SEQ ID NO: 1697 - DNA, 20 bp, synthetic construct
  source 1..20: mol_type = other DNA
ggttaggattcggcgctctc

SEQ ID NO: 1698 - DNA, 20 bp, synthetic construct
  source 1..20: mol_type = other DNA
gttaggattcggcgctctca

SEQ ID NO: 1699 - DNA, 20 bp, synthetic construct
  source 1..20: mol_type = other DNA
ttaggattcggcgctctcac

SEQ ID NO: 1700 - DNA, 20 bp, synthetic construct
  source 1..20: mol_type = other DNA
taggattcggcgctctcacc

SEQ ID NO: 1701 - DNA, 20 bp, synthetic construct
  source 1..20: mol_type = other DNA
aggattcggcgctctcaccg

SEQ ID NO: 1702 - DNA, 20 bp, synthetic construct
  source 1..20: mol_type = other DNA
ggattcggcgctctcaccgc

SEQ ID NO: 1703 - DNA, 20 bp, synthetic construct
  source 1..20: mol_type = other DNA
gattcggcgctctcaccgcc

SEQ ID NO: 1704 - DNA, 20 bp, synthetic construct
  source 1..20: mol_type = other DNA
attcggcgctctcaccgccg

SEQ ID NO: 1705 - DNA, 20 bp, synthetic construct
  source 1..20: mol_type = other DNA
ttcggcgctctcaccgccgc

SEQ ID NO: 1706 - DNA, 20 bp, synthetic construct
  source 1..20: mol_type = other DNA
tcggcgctctcaccgccgcg

SEQ ID NO: 1707 - DNA, 20 bp, synthetic construct
  source 1..20: mol_type = other DNA
cggcgctctcaccgccgcgg

SEQ ID NO: 1708 - DNA, 20 bp, synthetic construct
  source 1..20: mol_type = other DNA
ggcgctctcaccgccgcggc

SEQ ID NO: 1709 - DNA, 20 bp, synthetic construct
  source 1..20: mol_type = other DNA
gcgctctcaccgccgcggcc

SEQ ID NO: 1710 - DNA, 20 bp, synthetic construct
  source 1..20: mol_type = other DNA
cgctctcaccgccgcggccc

SEQ ID NO: 1711 - DNA, 20 bp, synthetic construct
  source 1..20: mol_type = other DNA
gctctcaccgccgcggcccg

SEQ ID NO: 1712 - DNA, 20 bp, synthetic construct
  source 1..20: mol_type = other DNA
ctctcaccgccgcggcccgg

SEQ ID NO: 1713 - DNA, 20 bp, synthetic construct
  source 1..20: mol_type = other DNA
gcggttaggattcctggttt

SEQ ID NO: 1714 - DNA, 20 bp, synthetic construct
  source 1..20: mol_type = other DNA
cggttaggattcctggtttt

SEQ ID NO: 1715 - DNA, 20 bp, synthetic construct
  source 1..20: mol_type = other DNA
ggttaggattcctggttttc

SEQ ID NO: 1716 - DNA, 20 bp, synthetic construct
  source 1..20: mol_type = other DNA
gttaggattcctggttttca

SEQ ID NO: 1717 - DNA, 20 bp, synthetic construct
  source 1..20: mol_type = other DNA
ttaggattcctggttttcac

SEQ ID NO: 1718 - DNA, 20 bp, synthetic construct
  source 1..20: mol_type = other DNA
taggattcctggttttcacc

SEQ ID NO: 1719 - DNA, 20 bp, synthetic construct
  source 1..20: mol_type = other DNA
aggattcctggttttcaccc

SEQ ID NO: 1720 - DNA, 20 bp, synthetic construct
  source 1..20: mol_type = other DNA
ggattcctggttttcaccca

SEQ ID NO: 1721 - DNA, 20 bp, synthetic construct
  source 1..20: mol_type = other DNA
gattcctggttttcacccag

SEQ ID NO: 1722 - DNA, 20 bp, synthetic construct
  source 1..20: mol_type = other DNA
attcctggttttcacccagg

SEQ ID NO: 1723 - DNA, 20 bp, synthetic construct
  source 1..20: mol_type = other DNA
ttcctggttttcacccaggt

SEQ ID NO: 1724 - DNA, 20 bp, synthetic construct
  source 1..20: mol_type = other DNA
tcctggttttcacccaggtg

SEQ ID NO: 1725 - DNA, 20 bp, synthetic construct
  source 1..20: mol_type = other DNA
cctggttttcacccaggtgg

SEQ ID NO: 1726 - DNA, 20 bp, synthetic construct
  source 1..20: mol_type = other DNA
ctggttttcacccaggtggc

SEQ ID NO: 1727 - DNA, 20 bp, synthetic construct
  source 1..20: mol_type = other DNA
tggttttcacccaggtggcc

SEQ ID NO: 1728 - DNA, 20 bp, synthetic construct
  source 1..20: mol_type = other DNA
ggttttcacccaggtggccc

SEQ ID NO: 1729 - DNA, 20 bp, synthetic construct
  source 1..20: mol_type = other DNA
gttttcacccaggtggcccg

SEQ ID NO: 1730 - DNA, 20 bp, synthetic construct
  source 1..20: mol_type = other DNA
ttttcacccaggtggcccgg

SEQ ID NO: 1731 - DNA, 20 bp, synthetic construct
  source 1..20: mol_type = other DNA
gcggttaggattcctggttt

SEQ ID NO: 1732 - DNA, 20 bp, synthetic construct
  source 1..20: mol_type = other DNA
cggttaggattcctggtttt

SEQ ID NO: 1733 - DNA, 20 bp, synthetic construct
  source 1..20: mol_type = other DNA
ggttaggattcctggttttc

SEQ ID NO: 1734 - DNA, 20 bp, synthetic construct
  source 1..20: mol_type = other DNA
gttaggattcctggttttca

SEQ ID NO: 1735 - DNA, 20 bp, synthetic construct
  source 1..20: mol_type = other DNA
ttaggattcctggttttcac

SEQ ID NO: 1736 - DNA, 20 bp, synthetic construct
  source 1..20: mol_type = other DNA
taggattcctggttttcacc

SEQ ID NO: 1737 - DNA, 20 bp, synthetic construct
  source 1..20: mol_type = other DNA
aggattcctggttttcaccc

SEQ ID NO: 1738 - DNA, 20 bp, synthetic construct
  source 1..20: mol_type = other DNA
ggattcctggttttcaccca

SEQ ID NO: 1739 - DNA, 20 bp, synthetic construct
  source 1..20: mol_type = other DNA
gattcctggttttcacccag

SEQ ID NO: 1740 - DNA, 20 bp, synthetic construct
  source 1..20: mol_type = other DNA
attcctggttttcacccagg

SEQ ID NO: 1741 - DNA, 20 bp, synthetic construct
  source 1..20: mol_type = other DNA
ttcctggttttcacccaggt

SEQ ID NO: 1742 - DNA, 20 bp, synthetic construct
  source 1..20: mol_type = other DNA
tcctggttttcacccaggtg

SEQ ID NO: 1743 - DNA, 20 bp, synthetic construct
  source 1..20: mol_type = other DNA
cctggttttcacccaggtgg

SEQ ID NO: 1744 - DNA, 20 bp, synthetic construct
  source 1..20: mol_type = other DNA
ctggttttcacccaggtggc

SEQ ID NO: 1745 - DNA, 20 bp, synthetic construct
  source 1..20: mol_type = other DNA
tggttttcacccaggtggcc

SEQ ID NO: 1746 - DNA, 20 bp, synthetic construct
  source 1..20: mol_type = other DNA
ggttttcacccaggtggccc

SEQ ID NO: 1747 - DNA, 20 bp, synthetic construct
  source 1..20: mol_type = other DNA
gttttcacccaggtggcccg

SEQ ID NO: 1748 - DNA, 20 bp, synthetic construct
  source 1..20: mol_type = other DNA
ttttcacccaggtggcccgg

SEQ ID NO: 1749 - DNA, 20 bp, synthetic construct
  source 1..20: mol_type = other DNA
gcggttaggattcctggttt

SEQ ID NO: 1750 - DNA, 20 bp, synthetic construct
  source 1..20: mol_type = other DNA
cggttaggattcctggtttt

SEQ ID NO: 1751 - DNA, 20 bp, synthetic construct
  source 1..20: mol_type = other DNA
ggttaggattcctggttttc

SEQ ID NO: 1752 - DNA, 20 bp, synthetic construct
  source 1..20: mol_type = other DNA
gttaggattcctggttttca

SEQ ID NO: 1753 - DNA, 20 bp, synthetic construct
  source 1..20: mol_type = other DNA
ttaggattcctggttttcac

SEQ ID NO: 1754 - DNA, 20 bp, synthetic construct
  source 1..20: mol_type = other DNA
taggattcctggttttcacc

SEQ ID NO: 1755 - DNA, 20 bp, synthetic construct
  source 1..20: mol_type = other DNA
aggattcctggttttcaccc

SEQ ID NO: 1756 - DNA, 20 bp, synthetic construct
  source 1..20: mol_type = other DNA
ggattcctggttttcaccca

SEQ ID NO: 1757 - DNA, 20 bp, synthetic construct
  source 1..20: mol_type = other DNA
gattcctggttttcacccag

SEQ ID NO: 1758 - DNA, 20 bp, synthetic construct
  source 1..20: mol_type = other DNA
attcctggttttcacccagg

SEQ ID NO: 1759 - DNA, 20 bp, synthetic construct
  source 1..20: mol_type = other DNA
ttcctggttttcacccaggc

SEQ ID NO: 1760 - DNA, 20 bp, synthetic construct
  source 1..20: mol_type = other DNA
tcctggttttcacccaggcg

SEQ ID NO: 1761 - DNA, 20 bp, synthetic construct
  source 1..20: mol_type = other DNA
cctggttttcacccaggcgg

SEQ ID NO: 1762 - DNA, 20 bp, synthetic construct
  source 1..20: mol_type = other DNA
ctggttttcacccaggcggc

SEQ ID NO: 1763 - DNA, 20 bp, synthetic construct
  source 1..20: mol_type = other DNA
tggttttcacccaggcggcc

SEQ ID NO: 1764 - DNA, 20 bp, synthetic construct
  source 1..20: mol_type = other DNA
ggttttcacccaggcggccc

SEQ ID NO: 1765 - DNA, 20 bp, synthetic construct
  source 1..20: mol_type = other DNA
gttttcacccaggcggcccg

SEQ ID NO: 1766 - DNA, 20 bp, synthetic construct
  source 1..20: mol_type = other DNA
ttttcacccaggcggcccgg

SEQ ID NO: 1767 - DNA, 20 bp, synthetic construct
  source 1..20: mol_type = other DNA
gcggttaggattcctggttt

SEQ ID NO: 1768 - DNA, 20 bp, synthetic construct
  source 1..20: mol_type = other DNA
cggttaggattcctggtttt

SEQ ID NO: 1769 - DNA, 20 bp, synthetic construct
  source 1..20: mol_type = other DNA
ggttaggattcctggttttc

SEQ ID NO: 1770 - DNA, 20 bp, synthetic construct
  source 1..20: mol_type = other DNA
gttaggattcctggttttca

SEQ ID NO: 1771 - DNA, 20 bp, synthetic construct
  source 1..20: mol_type = other DNA
ttaggattcctggttttcac

SEQ ID NO: 1772 - DNA, 20 bp, synthetic construct
  source 1..20: mol_type = other DNA
taggattcctggttttcacc

SEQ ID NO: 1773 - DNA, 20 bp, synthetic construct
  source 1..20: mol_type = other DNA
aggattcctggttttcaccc

SEQ ID NO: 1774 - DNA, 20 bp, synthetic construct
  source 1..20: mol_type = other DNA
ggattcctggttttcaccca

SEQ ID NO: 1775 - DNA, 20 bp, synthetic construct
  source 1..20: mol_type = other DNA
gattcctggttttcacccag

SEQ ID NO: 1776 - DNA, 20 bp, synthetic construct
  source 1..20: mol_type = other DNA
attcctggttttcacccagg

SEQ ID NO: 1777 - DNA, 20 bp, synthetic construct
  source 1..20: mol_type = other DNA
ttcctggttttcacccaggc

SEQ ID NO: 1778 - DNA, 20 bp, synthetic construct
  source 1..20: mol_type = other DNA
tcctggttttcacccaggcg

SEQ ID NO: 1779 - DNA, 20 bp, synthetic construct
  source 1..20: mol_type = other DNA
cctggttttcacccaggcgg

SEQ ID NO: 1780 - DNA, 20 bp, synthetic construct
  source 1..20: mol_type = other DNA
ctggttttcacccaggcggc

SEQ ID NO: 1781 - DNA, 20 bp, synthetic construct
  source 1..20: mol_type = other DNA
tggttttcacccaggcggcc

SEQ ID NO: 1782 - DNA, 20 bp, synthetic construct
  source 1..20: mol_type = other DNA
ggttttcacccaggcggccc

SEQ ID NO: 1783 - DNA, 20 bp, synthetic construct
  source 1..20: mol_type = other DNA
gttttcacccaggcggcccg

SEQ ID NO: 1784 - DNA, 20 bp, synthetic construct
  source 1..20: mol_type = other DNA
ttttcacccaggcggcccgg

SEQ ID NO: 1785 - DNA, 20 bp, synthetic construct
  source 1..20: mol_type = other DNA
gtggctaggattcggcgctt

SEQ ID NO: 1786 - DNA, 20 bp, synthetic construct
  source 1..20: mol_type = other DNA
tggctaggattcggcgcttt

SEQ ID NO: 1787 - DNA, 20 bp, synthetic construct
  source 1..20: mol_type = other DNA
ggctaggattcggcgctttc

SEQ ID NO: 1788 - DNA, 20 bp, synthetic construct
  source 1..20: mol_type = other DNA
gctaggattcggcgctttca

SEQ ID NO: 1789 - DNA, 20 bp, synthetic construct
  source 1..20: mol_type = other DNA
ctaggattcggcgctttcac

SEQ ID NO: 1790 - DNA, 20 bp, synthetic construct
  source 1..20: mol_type = other DNA
taggattcggcgctttcacc

SEQ ID NO: 1791 - DNA, 20 bp, synthetic construct
  source 1..20: mol_type = other DNA
aggattcggcgctttcaccg

SEQ ID NO: 1792 - DNA, 20 bp, synthetic construct
  source 1..20: mol_type = other DNA
ggattcggcgctttcaccgc

SEQ ID NO: 1793 - DNA, 20 bp, synthetic construct
  source 1..20: mol_type = other DNA
gattcggcgctttcaccgcc

SEQ ID NO: 1794 - DNA, 20 bp, synthetic construct
  source 1..20: mol_type = other DNA
attcggcgctttcaccgccg

SEQ ID NO: 1795 - DNA, 20 bp, synthetic construct
  source 1..20: mol_type = other DNA
ttcggcgctttcaccgccgc

SEQ ID NO: 1796 - DNA, 20 bp, synthetic construct
  source 1..20: mol_type = other DNA
tcggcgctttcaccgccgcg

SEQ ID NO: 1797 - DNA, 20 bp, synthetic construct
  source 1..20: mol_type = other DNA
cggcgctttcaccgccgcgg

SEQ ID NO: 1798 - DNA, 20 bp, synthetic construct
  source 1..20: mol_type = other DNA
ggcgctttcaccgccgcggc

SEQ ID NO: 1799 - DNA, 20 bp, synthetic construct
  source 1..20: mol_type = other DNA
gcgctttcaccgccgcggcc

SEQ ID NO: 1800 - DNA, 20 bp, synthetic construct
  source 1..20: mol_type = other DNA
cgctttcaccgccgcggccc

SEQ ID NO: 1801 - DNA, 20 bp, synthetic construct
  source 1..20: mol_type = other DNA
gctttcaccgccgcggcccg

SEQ ID NO: 1802 - DNA, 20 bp, synthetic construct
  source 1..20: mol_type = other DNA
ctttcaccgccgcggcccgg

SEQ ID NO: 1803 - DNA, 20 bp, synthetic construct
  source 1..20: mol_type = other DNA
gtggctaggattcggcgctt

SEQ ID NO: 1804 - DNA, 20 bp, synthetic construct
  source 1..20: mol_type = other DNA
tggctaggattcggcgcttt

SEQ ID NO: 1805 - DNA, 20 bp, synthetic construct
  source 1..20: mol_type = other DNA
ggctaggattcggcgctttc

SEQ ID NO: 1806 - DNA, 20 bp, synthetic construct
  source 1..20: mol_type = other DNA
gctaggattcggcgctttca

SEQ ID NO: 1807 - DNA, 20 bp, synthetic construct
  source 1..20: mol_type = other DNA
ctaggattcggcgctttcac

SEQ ID NO: 1808 - DNA, 20 bp, synthetic construct
  source 1..20: mol_type = other DNA
taggattcggcgctttcacc

SEQ ID NO: 1809 - DNA, 20 bp, synthetic construct
  source 1..20: mol_type = other DNA
aggattcggcgctttcaccg

SEQ ID NO: 1810 - DNA, 20 bp, synthetic construct
  source 1..20: mol_type = other DNA
ggattcggcgctttcaccgc

SEQ ID NO: 1811 - DNA, 20 bp, synthetic construct
  source 1..20: mol_type = other DNA
gattcggcgctttcaccgcc

SEQ ID NO: 1812 - DNA, 20 bp, synthetic construct
  source 1..20: mol_type = other DNA
attcggcgctttcaccgccg

SEQ ID NO: 1813 - DNA, 20 bp, synthetic construct
  source 1..20: mol_type = other DNA
ttcggcgctttcaccgccgc

SEQ ID NO: 1814 - DNA, 20 bp, synthetic construct
  source 1..20: mol_type = other DNA
tcggcgctttcaccgccgcg

SEQ ID NO: 1815 - DNA, 20 bp, synthetic construct
  source 1..20: mol_type = other DNA
cggcgctttcaccgccgcgg

SEQ ID NO: 1816 - DNA, 20 bp, synthetic construct
  source 1..20: mol_type = other DNA
ggcgctttcaccgccgcggc

SEQ ID NO: 1817 - DNA, 20 bp, synthetic construct
  source 1..20: mol_type = other DNA
gcgctttcaccgccgcggcc

SEQ ID NO: 1818 - DNA, 20 bp, synthetic construct
  source 1..20: mol_type = other DNA
cgctttcaccgccgcggccc

SEQ ID NO: 1819 - DNA, 20 bp, synthetic construct
  source 1..20: mol_type = other DNA
gctttcaccgccgcggcccg

SEQ ID NO: 1820 - DNA, 20 bp, synthetic construct
  source 1..20: mol_type = other DNA
ctttcaccgccgcggcccgg

SEQ ID NO: 1821 - DNA, 20 bp, synthetic construct
  source 1..20: mol_type = other DNA
gtggctaggattcggcgctt

SEQ ID NO: 1822 - DNA, 20 bp, synthetic construct
  source 1..20: mol_type = other DNA
tggctaggattcggcgcttt

SEQ ID NO: 1823 - DNA, 20 bp, synthetic construct
  source 1..20: mol_type = other DNA
ggctaggattcggcgctttc

SEQ ID NO: 1824 - DNA, 20 bp, synthetic construct
  source 1..20: mol_type = other DNA
gctaggattcggcgctttca

SEQ ID NO: 1825 - DNA, 20 bp, synthetic construct
  source 1..20: mol_type = other DNA
ctaggattcggcgctttcac

SEQ ID NO: 1826 - DNA, 20 bp, synthetic construct
  source 1..20: mol_type = other DNA
taggattcggcgctttcacc

SEQ ID NO: 1827 - DNA, 20 bp, synthetic construct
  source 1..20: mol_type = other DNA
aggattcggcgctttcaccg

SEQ ID NO: 1828 - DNA, 20 bp, synthetic construct
  source 1..20: mol_type = other DNA
ggattcggcgctttcaccgc

SEQ ID NO: 1829 - DNA, 20 bp, synthetic construct
  source 1..20: mol_type = other DNA
gattcggcgctttcaccgcc

SEQ ID NO: 1830 - DNA, 20 bp, synthetic construct
  source 1..20: mol_type = other DNA
attcggcgctttcaccgccg

SEQ ID NO: 1831 - DNA, 20 bp, synthetic construct
  source 1..20: mol_type = other DNA
ttcggcgctttcaccgccgc

SEQ ID NO: 1832 - DNA, 20 bp, synthetic construct
  source 1..20: mol_type = other DNA
tcggcgctttcaccgccgcg

SEQ ID NO: 1833 - DNA, 20 bp, synthetic construct
  source 1..20: mol_type = other DNA
cggcgctttcaccgccgcgg

SEQ ID NO: 1834 - DNA, 20 bp, synthetic construct
  source 1..20: mol_type = other DNA
ggcgctttcaccgccgcggc

SEQ ID NO: 1835 - DNA, 20 bp, synthetic construct
  source 1..20: mol_type = other DNA
gcgctttcaccgccgcggcc

SEQ ID NO: 1836 - DNA, 20 bp, synthetic construct
  source 1..20: mol_type = other DNA
cgctttcaccgccgcggccc

SEQ ID NO: 1837 - DNA, 20 bp, synthetic construct
  source 1..20: mol_type = other DNA
gctttcaccgccgcggcccg

SEQ ID NO: 1838 - DNA, 20 bp, synthetic construct
  source 1..20: mol_type = other DNA
ctttcaccgccgcggcccgg

SEQ ID NO: 1839 - DNA, 20 bp, synthetic construct
  source 1..20: mol_type = other DNA
gtggttagcatagctgcctt

SEQ ID NO: 1840 - DNA, 20 bp, synthetic construct
  source 1..20: mol_type = other DNA
tggttagcatagctgccttc

SEQ ID NO: 1841 - DNA, 20 bp, synthetic construct
  source 1..20: mol_type = other DNA
ggttagcatagctgccttcc

SEQ ID NO: 1842 - DNA, 20 bp, synthetic construct
  source 1..20: mol_type = other DNA
gttagcatagctgccttcca

SEQ ID NO: 1843 - DNA, 20 bp, synthetic construct
  source 1..20: mol_type = other DNA
ttagcatagctgccttccaa

SEQ ID NO: 1844 - DNA, 20 bp, synthetic construct
  source 1..20: mol_type = other DNA
tagcatagctgccttccaag

SEQ ID NO: 1845 - DNA, 20 bp, synthetic construct
  source 1..20: mol_type = other DNA
agcatagctgccttccaagc

SEQ ID NO: 1846 - DNA, 20 bp, synthetic construct
  source 1..20: mol_type = other DNA
gcatagctgccttccaagca

SEQ ID NO: 1847 - DNA, 20 bp, synthetic construct
  source 1..20: mol_type = other DNA
catagctgccttccaagcag

SEQ ID NO: 1848 - DNA, 20 bp, synthetic construct
  source 1..20: mol_type = other DNA
atagctgccttccaagcagt

SEQ ID NO: 1849 - DNA, 20 bp, synthetic construct
  source 1..20: mol_type = other DNA
tagctgccttccaagcagtt

SEQ ID NO: 1850 - DNA, 20 bp, synthetic construct
  source 1..20: mol_type = other DNA
agctgccttccaagcagttg

SEQ ID NO: 1851 - DNA, 20 bp, synthetic construct
  source 1..20: mol_type = other DNA
gctgccttccaagcagttga

SEQ ID NO: 1852 - DNA, 20 bp, synthetic construct
  source 1..20: mol_type = other DNA
ctgccttccaagcagttgac

SEQ ID NO: 1853 - DNA, 20 bp, synthetic construct
  source 1..20: mol_type = other DNA
tgccttccaagcagttgacc

SEQ ID NO: 1854 - DNA, 20 bp, synthetic construct
  source 1..20: mol_type = other DNA
gccttccaagcagttgaccc

SEQ ID NO: 1855 - DNA, 20 bp, synthetic construct
  source 1..20: mol_type = other DNA
ccttccaagcagttgacccg

SEQ ID NO: 1856 - DNA, 20 bp, synthetic construct
  source 1..20: mol_type = other DNA
cttccaagcagttgacccgg

SEQ ID NO: 1857 - DNA, 20 bp, synthetic construct
  source 1..20: mol_type = other DNA
gtggtgagcatagctgcctt

SEQ ID NO: 1858 - DNA, 20 bp, synthetic construct
  source 1..20: mol_type = other DNA
tggtgagcatagctgccttc

SEQ ID NO: 1859 - DNA, 20 bp, synthetic construct
  source 1..20: mol_type = other DNA
ggtgagcatagctgccttcc

SEQ ID NO: 1860 - DNA, 20 bp, synthetic construct
  source 1..20: mol_type = other DNA
gtgagcatagctgccttcca

SEQ ID NO: 1861 - DNA, 20 bp, synthetic construct
  source 1..20: mol_type = other DNA
tgagcatagctgccttccaa

SEQ ID NO: 1862 - DNA, 20 bp, synthetic construct
  source 1..20: mol_type = other DNA
gagcatagctgccttccaag

SEQ ID NO: 1863 - DNA, 20 bp, synthetic construct
  source 1..20: mol_type = other DNA
agcatagctgccttccaagc

SEQ ID NO: 1864 - DNA, 20 bp, synthetic construct
  source 1..20: mol_type = other DNA
gcatagctgccttccaagca

SEQ ID NO: 1865 - DNA, 20 bp, synthetic construct
  source 1..20: mol_type = other DNA
catagctgccttccaagcag

SEQ ID NO: 1866 - DNA, 20 bp, synthetic construct
  source 1..20: mol_type = other DNA
atagctgccttccaagcagt

SEQ ID NO: 1867 - DNA, 20 bp, synthetic construct
  source 1..20: mol_type = other DNA
tagctgccttccaagcagtt

SEQ ID NO: 1868 - DNA, 20 bp, synthetic construct
  source 1..20: mol_type = other DNA
agctgccttccaagcagttg

SEQ ID NO: 1869 - DNA, 20 bp, synthetic construct
  source 1..20: mol_type = other DNA
gctgccttccaagcagttga

SEQ ID NO: 1870 - DNA, 20 bp, synthetic construct
  source 1..20: mol_type = other DNA
ctgccttccaagcagttgac

SEQ ID NO: 1871 - DNA, 20 bp, synthetic construct
  source 1..20: mol_type = other DNA
tgccttccaagcagttgacc

SEQ ID NO: 1872 - DNA, 20 bp, synthetic construct
  source 1..20: mol_type = other DNA
gccttccaagcagttgaccc

SEQ ID NO: 1873 - DNA, 20 bp, synthetic construct
  source 1..20: mol_type = other DNA
ccttccaagcagttgacccg

SEQ ID NO: 1874 - DNA, 20 bp, synthetic construct
  source 1..20: mol_type = other DNA
cttccaagcagttgacccgg

SEQ ID NO: 1875 - DNA, 20 bp, synthetic construct
  source 1..20: mol_type = other DNA
gtggtgagcatagctgcctt

SEQ ID NO: 1876 - DNA, 20 bp, synthetic construct
  source 1..20: mol_type = other DNA
tggtgagcatagctgccttc

SEQ ID NO: 1877 - DNA, 20 bp, synthetic construct
  source 1..20: mol_type = other DNA
ggtgagcatagctgccttcc

SEQ ID NO: 1878 - DNA, 20 bp, synthetic construct
  source 1..20: mol_type = other DNA
gtgagcatagctgccttcca

SEQ ID NO: 1879 - DNA, 20 bp, synthetic construct
  source 1..20: mol_type = other DNA
tgagcatagctgccttccaa

SEQ ID NO: 1880 - DNA, 20 bp, synthetic construct
  source 1..20: mol_type = other DNA
gagcatagctgccttccaag

SEQ ID NO: 1881 - DNA, 20 bp, synthetic construct
  source 1..20: mol_type = other DNA
agcatagctgccttccaagc

SEQ ID NO: 1882 - DNA, 20 bp, synthetic construct
  source 1..20: mol_type = other DNA
gcatagctgccttccaagca

SEQ ID NO: 1883 - DNA, 20 bp, synthetic construct
  source 1..20: mol_type = other DNA
catagctgccttccaagcag

SEQ ID NO: 1884 - DNA, 20 bp, synthetic construct
  source 1..20: mol_type = other DNA
atagctgccttccaagcagt

SEQ ID NO: 1885 - DNA, 20 bp, synthetic construct
  source 1..20: mol_type = other DNA
tagctgccttccaagcagtt

SEQ ID NO: 1886 - DNA, 20 bp, synthetic construct
  source 1..20: mol_type = other DNA
agctgccttccaagcagttg

SEQ ID NO: 1887 - DNA, 20 bp, synthetic construct
  source 1..20: mol_type = other DNA
gctgccttccaagcagttga

SEQ ID NO: 1888 - DNA, 20 bp, synthetic construct
  source 1..20: mol_type = other DNA
ctgccttccaagcagttgac

SEQ ID NO: 1889 - DNA, 20 bp, synthetic construct
  source 1..20: mol_type = other DNA
tgccttccaagcagttgacc

SEQ ID NO: 1890 - DNA, 20 bp, synthetic construct
  source 1..20: mol_type = other DNA
gccttccaagcagttgaccc

SEQ ID NO: 1891 - DNA, 20 bp, synthetic construct
  source 1..20: mol_type = other DNA
ccttccaagcagttgacccg

SEQ ID NO: 1892 - DNA, 20 bp, synthetic construct
  source 1..20: mol_type = other DNA
cttccaagcagttgacccgg

SEQ ID NO: 1893 - DNA, 20 bp, synthetic construct
  source 1..20: mol_type = other DNA
gtggtgagcatagctgcctt

SEQ ID NO: 1894 - DNA, 20 bp, synthetic construct
  source 1..20: mol_type = other DNA
tggtgagcatagctgccttc

SEQ ID NO: 1895 - DNA, 20 bp, synthetic construct
  source 1..20: mol_type = other DNA
ggtgagcatagctgccttcc

SEQ ID NO: 1896 - DNA, 20 bp, synthetic construct
  source 1..20: mol_type = other DNA
gtgagcatagctgccttcca

SEQ ID NO: 1897 - DNA, 20 bp, synthetic construct
  source 1..20: mol_type = other DNA
tgagcatagctgccttccaa

SEQ ID NO: 1898 - DNA, 20 bp, synthetic construct
  source 1..20: mol_type = other DNA
gagcatagctgccttccaag

SEQ ID NO: 1899 - DNA, 20 bp, synthetic construct
  source 1..20: mol_type = other DNA
agcatagctgccttccaagc

SEQ ID NO: 1900 - DNA, 20 bp, synthetic construct
  source 1..20: mol_type = other DNA
gcatagctgccttccaagca

SEQ ID NO: 1901 - DNA, 20 bp, synthetic construct
  source 1..20: mol_type = other DNA
catagctgccttccaagcag

SEQ ID NO: 1902 - DNA, 20 bp, synthetic construct
  source 1..20: mol_type = other DNA
atagctgccttccaagcagt

SEQ ID NO: 1903 - DNA, 20 bp, synthetic construct
  source 1..20: mol_type = other DNA
tagctgccttccaagcagtt

SEQ ID NO: 1904 - DNA, 20 bp, synthetic construct
  source 1..20: mol_type = other DNA
agctgccttccaagcagttg

SEQ ID NO: 1905 - DNA, 20 bp, synthetic construct
  source 1..20: mol_type = other DNA
gctgccttccaagcagttga

SEQ ID NO: 1906 - DNA, 20 bp, synthetic construct
  source 1..20: mol_type = other DNA
ctgccttccaagcagttgac

SEQ ID NO: 1907 - DNA, 20 bp, synthetic construct
  source 1..20: mol_type = other DNA
tgccttccaagcagttgacc

SEQ ID NO: 1908 - DNA, 20 bp, synthetic construct
  source 1..20: mol_type = other DNA
gccttccaagcagttgaccc

SEQ ID NO: 1909 - DNA, 20 bp, synthetic construct
  source 1..20: mol_type = other DNA
ccttccaagcagttgacccg

SEQ ID NO: 1910 - DNA, 20 bp, synthetic construct
  source 1..20: mol_type = other DNA
cttccaagcagttgacccgg

SEQ ID NO: 1911 - DNA, 20 bp, synthetic construct
  source 1..20: mol_type = other DNA
gtggtgagcatagctgcctt

SEQ ID NO: 1912 - DNA, 20 bp, synthetic construct
  source 1..20: mol_type = other DNA
tggtgagcatagctgccttc

SEQ ID NO: 1913 - DNA, 20 bp, synthetic construct
  source 1..20: mol_type = other DNA
ggtgagcatagctgccttcc

SEQ ID NO: 1914 - DNA, 20 bp, synthetic construct
  source 1..20: mol_type = other DNA
gtgagcatagctgccttcca

SEQ ID NO: 1915 - DNA, 20 bp, synthetic construct
  source 1..20: mol_type = other DNA
tgagcatagctgccttccaa

SEQ ID NO: 1916 - DNA, 20 bp, synthetic construct
  source 1..20: mol_type = other DNA
gagcatagctgccttccaag

SEQ ID NO: 1917 - DNA, 20 bp, synthetic construct
  source 1..20: mol_type = other DNA
agcatagctgccttccaagc

SEQ ID NO: 1918 - DNA, 20 bp, synthetic construct
  source 1..20: mol_type = other DNA
gcatagctgccttccaagca

SEQ ID NO: 1919 - DNA, 20 bp, synthetic construct
  source 1..20: mol_type = other DNA
catagctgccttccaagcag

SEQ ID NO: 1920 - DNA, 20 bp, synthetic construct
  source 1..20: mol_type = other DNA
atagctgccttccaagcagt

SEQ ID NO: 1921 - DNA, 20 bp, synthetic construct
  source 1..20: mol_type = other DNA
tagctgccttccaagcagtt

SEQ ID NO: 1922 - DNA, 20 bp, synthetic construct
  source 1..20: mol_type = other DNA
agctgccttccaagcagttg

SEQ ID NO: 1923 - DNA, 20 bp, synthetic construct
  source 1..20: mol_type = other DNA
gctgccttccaagcagttga

SEQ ID NO: 1924 - DNA, 20 bp, synthetic construct
  source 1..20: mol_type = other DNA
ctgccttccaagcagttgac

SEQ ID NO: 1925 - DNA, 20 bp, synthetic construct
  source 1..20: mol_type = other DNA
tgccttccaagcagttgacc

SEQ ID NO: 1926 - DNA, 20 bp, synthetic construct
  source 1..20: mol_type = other DNA
gccttccaagcagttgaccc

SEQ ID NO: 1927 - DNA, 20 bp, synthetic construct
  source 1..20: mol_type = other DNA
ccttccaagcagttgacccg

SEQ ID NO: 1928 - DNA, 20 bp, synthetic construct
  source 1..20: mol_type = other DNA
cttccaagcagttgacccgg

SEQ ID NO: 1929 - DNA, 20 bp, synthetic construct
  source 1..20: mol_type = other DNA
gtggtgagcatagctgcctt

SEQ ID NO: 1930 - DNA, 20 bp, synthetic construct
  source 1..20: mol_type = other DNA
tggtgagcatagctgccttc

SEQ ID NO: 1931 - DNA, 20 bp, synthetic construct
  source 1..20: mol_type = other DNA
ggtgagcatagctgccttcc

SEQ ID NO: 1932 - DNA, 20 bp, synthetic construct
  source 1..20: mol_type = other DNA
gtgagcatagctgccttcca

SEQ ID NO: 1933 - DNA, 20 bp, synthetic construct
  source 1..20: mol_type = other DNA
tgagcatagctgccttccaa

SEQ ID NO: 1934 - DNA, 20 bp, synthetic construct
  source 1..20: mol_type = other DNA
gagcatagctgccttccaag

SEQ ID NO: 1935 - DNA, 20 bp, synthetic construct
  source 1..20: mol_type = other DNA
agcatagctgccttccaagc

SEQ ID NO: 1936 - DNA, 20 bp, synthetic construct
  source 1..20: mol_type = other DNA
gcatagctgccttccaagca

SEQ ID NO: 1937 - DNA, 20 bp, synthetic construct
  source 1..20: mol_type = other DNA
catagctgccttccaagcag

SEQ ID NO: 1938 - DNA, 20 bp, synthetic construct
  source 1..20: mol_type = other DNA
atagctgccttccaagcagt

SEQ ID NO: 1939 - DNA, 20 bp, synthetic construct
  source 1..20: mol_type = other DNA
tagctgccttccaagcagtt

SEQ ID NO: 1940 - DNA, 20 bp, synthetic construct
  source 1..20: mol_type = other DNA
agctgccttccaagcagttg

SEQ ID NO: 1941 - DNA, 20 bp, synthetic construct
  source 1..20: mol_type = other DNA
gctgccttccaagcagttga

SEQ ID NO: 1942 - DNA, 20 bp, synthetic construct
  source 1..20: mol_type = other DNA
ctgccttccaagcagttgac

SEQ ID NO: 1943 - DNA, 20 bp, synthetic construct
  source 1..20: mol_type = other DNA
tgccttccaagcagttgacc

SEQ ID NO: 1944 - DNA, 20 bp, synthetic construct
  source 1..20: mol_type = other DNA
gccttccaagcagttgaccc

SEQ ID NO: 1945 - DNA, 20 bp, synthetic construct
  source 1..20: mol_type = other DNA
ccttccaagcagttgacccg

SEQ ID NO: 1946 - DNA, 20 bp, synthetic construct
  source 1..20: mol_type = other DNA
cttccaagcagttgacccgg

SEQ ID NO: 1947 - DNA, 20 bp, synthetic construct
  source 1..20: mol_type = other DNA
gtggtgagcatagctgcctt

SEQ ID NO: 1948 - DNA, 20 bp, synthetic construct
  source 1..20: mol_type = other DNA
tggtgagcatagctgccttc

SEQ ID NO: 1949 - DNA, 20 bp, synthetic construct
  source 1..20: mol_type = other DNA
ggtgagcatagctgccttcc

SEQ ID NO: 1950 - DNA, 20 bp, synthetic construct
  source 1..20: mol_type = other DNA
gtgagcatagctgccttcca

SEQ ID NO: 1951 - DNA, 20 bp, synthetic construct
  source 1..20: mol_type = other DNA
tgagcatagctgccttccaa

SEQ ID NO: 1952 - DNA, 20 bp, synthetic construct
  source 1..20: mol_type = other DNA
gagcatagctgccttccaag

SEQ ID NO: 1953 - DNA, 20 bp, synthetic construct
  source 1..20: mol_type = other DNA
agcatagctgccttccaagc

SEQ ID NO: 1954 - DNA, 20 bp, synthetic construct
  source 1..20: mol_type = other DNA
gcatagctgccttccaagca

SEQ ID NO: 1955 - DNA, 20 bp, synthetic construct
  source 1..20: mol_type = other DNA
catagctgccttccaagcag

SEQ ID NO: 1956 - DNA, 20 bp, synthetic construct
  source 1..20: mol_type = other DNA
atagctgccttccaagcagt

SEQ ID NO: 1957 - DNA, 20 bp, synthetic construct
  source 1..20: mol_type = other DNA
tagctgccttccaagcagtt

SEQ ID NO: 1958 - DNA, 20 bp, synthetic construct
  source 1..20: mol_type = other DNA
agctgccttccaagcagttg

SEQ ID NO: 1959 - DNA, 20 bp, synthetic construct
  source 1..20: mol_type = other DNA
gctgccttccaagcagttga

SEQ ID NO: 1960 - DNA, 20 bp, synthetic construct
  source 1..20: mol_type = other DNA
ctgccttccaagcagttgac

SEQ ID NO: 1961 - DNA, 20 bp, synthetic construct
  source 1..20: mol_type = other DNA
tgccttccaagcagttgacc

SEQ ID NO: 1962 - DNA, 20 bp, synthetic construct
  source 1..20: mol_type = other DNA
gccttccaagcagttgaccc

SEQ ID NO: 1963 - DNA, 20 bp, synthetic construct
  source 1..20: mol_type = other DNA
ccttccaagcagttgacccg

SEQ ID NO: 1964 - DNA, 20 bp, synthetic construct
  source 1..20: mol_type = other DNA
cttccaagcagttgacccgg

SEQ ID NO: 1965 - DNA, 20 bp, synthetic construct
  source 1..20: mol_type = other DNA
gtggtaagcatagctgcctt

SEQ ID NO: 1966 - DNA, 20 bp, synthetic construct
  source 1..20: mol_type = other DNA
tggtaagcatagctgccttc

SEQ ID NO: 1967 - DNA, 20 bp, synthetic construct
  source 1..20: mol_type = other DNA
ggtaagcatagctgccttcc

SEQ ID NO: 1968 - DNA, 20 bp, synthetic construct
  source 1..20: mol_type = other DNA
gtaagcatagctgccttcca

SEQ ID NO: 1969 - DNA, 20 bp, synthetic construct
  source 1..20: mol_type = other DNA
taagcatagctgccttccaa

SEQ ID NO: 1970 - DNA, 20 bp, synthetic construct
  source 1..20: mol_type = other DNA
aagcatagctgccttccaag

SEQ ID NO: 1971 - DNA, 20 bp, synthetic construct
  source 1..20: mol_type = other DNA
agcatagctgccttccaagc

SEQ ID NO: 1972 - DNA, 20 bp, synthetic construct
  source 1..20: mol_type = other DNA
gcatagctgccttccaagca

SEQ ID NO: 1973 - DNA, 20 bp, synthetic construct
  source 1..20: mol_type = other DNA
catagctgccttccaagcag

SEQ ID NO: 1974 - DNA, 20 bp, synthetic construct
  source 1..20: mol_type = other DNA
atagctgccttccaagcagt

SEQ ID NO: 1975 - DNA, 20 bp, synthetic construct
  source 1..20: mol_type = other DNA
tagctgccttccaagcagtt

SEQ ID NO: 1976 - DNA, 20 bp, synthetic construct
  source 1..20: mol_type = other DNA
agctgccttccaagcagttg

SEQ ID NO: 1977 - DNA, 20 bp, synthetic construct
  source 1..20: mol_type = other DNA
gctgccttccaagcagttga

SEQ ID NO: 1978 - DNA, 20 bp, synthetic construct
  source 1..20: mol_type = other DNA
ctgccttccaagcagttgac

SEQ ID NO: 1979 - DNA, 20 bp, synthetic construct
  source 1..20: mol_type = other DNA
tgccttccaagcagttgacc

SEQ ID NO: 1980 - DNA, 20 bp, synthetic construct
  source 1..20: mol_type = other DNA
gccttccaagcagttgaccc

SEQ ID NO: 1981 - DNA, 20 bp, synthetic construct
  source 1..20: mol_type = other DNA
ccttccaagcagttgacccg

SEQ ID NO: 1982 - DNA, 20 bp, synthetic construct
  source 1..20: mol_type = other DNA
cttccaagcagttgacccgg

SEQ ID NO: 1983 - DNA, 20 bp, synthetic construct
  source 1..20: mol_type = other DNA
gtggtgagcatagttgcctt

SEQ ID NO: 1984 - DNA, 20 bp, synthetic construct
  source 1..20: mol_type = other DNA
tggtgagcatagttgccttc

SEQ ID NO: 1985 - DNA, 20 bp, synthetic construct
  source 1..20: mol_type = other DNA
ggtgagcatagttgccttcc

SEQ ID NO: 1986 - DNA, 20 bp, synthetic construct
  source 1..20: mol_type = other DNA
gtgagcatagttgccttcca

SEQ ID NO: 1987 - DNA, 20 bp, synthetic construct
  source 1..20: mol_type = other DNA
tgagcatagttgccttccaa

SEQ ID NO: 1988 - DNA, 20 bp, synthetic construct
  source 1..20: mol_type = other DNA
gagcatagttgccttccaag

SEQ ID NO: 1989 - DNA, 20 bp, synthetic construct
  source 1..20: mol_type = other DNA
agcatagttgccttccaagc

SEQ ID NO: 1990 - DNA, 20 bp, synthetic construct
  source 1..20: mol_type = other DNA
gcatagttgccttccaagca

SEQ ID NO: 1991 - DNA, 20 bp, synthetic construct
  source 1..20: mol_type = other DNA
catagttgccttccaagcag

SEQ ID NO: 1992 - DNA, 20 bp, synthetic construct
  source 1..20: mol_type = other DNA
atagttgccttccaagcagt

SEQ ID NO: 1993 - DNA, 20 bp, synthetic construct
  source 1..20: mol_type = other DNA
tagttgccttccaagcagtt

SEQ ID NO: 1994 - DNA, 20 bp, synthetic construct
  source 1..20: mol_type = other DNA
agttgccttccaagcagttg

SEQ ID NO: 1995 - DNA, 20 bp, synthetic construct
  source 1..20: mol_type = other DNA
gttgccttccaagcagttga

SEQ ID NO: 1996 - DNA, 20 bp, synthetic construct
  source 1..20: mol_type = other DNA
ttgccttccaagcagttgac

SEQ ID NO: 1997 - DNA, 20 bp, synthetic construct
  source 1..20: mol_type = other DNA
tgccttccaagcagttgacc

SEQ ID NO: 1998 - DNA, 20 bp, synthetic construct
  source 1..20: mol_type = other DNA
gccttccaagcagttgaccc

SEQ ID NO: 1999 - DNA, 20 bp, synthetic construct
  source 1..20: mol_type = other DNA
ccttccaagcagttgacccg

SEQ ID NO: 2000 - DNA, 20 bp, synthetic construct
  source 1..20: mol_type = other DNA
cttccaagcagttgacccgg

SEQ ID NO: 2001 - DNA, 20 bp, synthetic construct
  source 1..20: mol_type = other DNA
ggttaaggcgttggacttaa

SEQ ID NO: 2002 - DNA, 20 bp, synthetic construct
  source 1..20: mol_type = other DNA
gttaaggcgttggacttaag

SEQ ID NO: 2003 - DNA, 20 bp, synthetic construct
  source 1..20: mol_type = other DNA
ttaaggcgttggacttaaga

SEQ ID NO: 2004 - DNA, 20 bp, synthetic construct
  source 1..20: mol_type = other DNA
taaggcgttggacttaagat

SEQ ID NO: 2005 - DNA, 20 bp, synthetic construct
  source 1..20: mol_type = other DNA
aaggcgttggacttaagatc

SEQ ID NO: 2006 - DNA, 20 bp, synthetic construct
  source 1..20: mol_type = other DNA
aggcgttggacttaagatcc

SEQ ID NO: 2007 - DNA, 20 bp, synthetic construct
  source 1..20: mol_type = other DNA
ggcgttggacttaagatcca

SEQ ID NO: 2008 - DNA, 20 bp, synthetic construct
  source 1..20: mol_type = other DNA
gcgttggacttaagatccaa

SEQ ID NO: 2009 - DNA, 20 bp, synthetic construct
  source 1..20: mol_type = other DNA
cgttggacttaagatccaat

SEQ ID NO: 2010 - DNA, 20 bp, synthetic construct
  source 1..20: mol_type = other DNA
gttggacttaagatccaatg

SEQ ID NO: 2011 - DNA, 20 bp, synthetic construct
  source 1..20: mol_type = other DNA
ttggacttaagatccaatgg

SEQ ID NO: 2012 - DNA, 20 bp, synthetic construct
  source 1..20: mol_type = other DNA
tggacttaagatccaatgga

SEQ ID NO: 2013 - DNA, 20 bp, synthetic construct
  source 1..20: mol_type = other DNA
ggacttaagatccaatggac

SEQ ID NO: 2014 - DNA, 20 bp, synthetic construct
  source 1..20: mol_type = other DNA
gacttaagatccaatggaca

SEQ ID NO: 2015 - DNA, 20 bp, synthetic construct
  source 1..20: mol_type = other DNA
ggttaaggcgttggacttaa

SEQ ID NO: 2016 - DNA, 20 bp, synthetic construct
  source 1..20: mol_type = other DNA
gttaaggcgttggacttaag

SEQ ID NO: 2017 - DNA, 20 bp, synthetic construct
  source 1..20: mol_type = other DNA
ttaaggcgttggacttaaga

SEQ ID NO: 2018 - DNA, 20 bp, synthetic construct
  source 1..20: mol_type = other DNA
taaggcgttggacttaagat

SEQ ID NO: 2019 - DNA, 20 bp, synthetic construct
  source 1..20: mol_type = other DNA
aaggcgttggacttaagatc

SEQ ID NO: 2020 - DNA, 20 bp, synthetic construct
  source 1..20: mol_type = other DNA
aggcgttggacttaagatcc

SEQ ID NO: 2021 - DNA, 20 bp, synthetic construct
  source 1..20: mol_type = other DNA
ggcgttggacttaagatcca

SEQ ID NO: 2022 - DNA, 20 bp, synthetic construct
  source 1..20: mol_type = other DNA
gcgttggacttaagatccaa

SEQ ID NO: 2023 - DNA, 20 bp, synthetic construct
  source 1..20: mol_type = other DNA
cgttggacttaagatccaat

SEQ ID NO: 2024 - DNA, 20 bp, synthetic construct
  source 1..20: mol_type = other DNA
gttggacttaagatccaatg

SEQ ID NO: 2025 - DNA, 20 bp, synthetic construct
  source 1..20: mol_type = other DNA
ttggacttaagatccaatgg

SEQ ID NO: 2026 - DNA, 20 bp, synthetic construct
  source 1..20: mol_type = other DNA
tggacttaagatccaatggg

SEQ ID NO: 2027 - DNA, 20 bp, synthetic construct
  source 1..20: mol_type = other DNA
ggacttaagatccaatgggc

SEQ ID NO: 2028 - DNA, 20 bp, synthetic construct
  source 1..20: mol_type = other DNA
gacttaagatccaatgggct

SEQ ID NO: 2029 - DNA, 20 bp, synthetic construct
  source 1..20: mol_type = other DNA
ggttaaggcgttggacttaa

SEQ ID NO: 2030 - DNA, 20 bp, synthetic construct
  source 1..20: mol_type = other DNA
gttaaggcgttggacttaag

SEQ ID NO: 2031 - DNA, 20 bp, synthetic construct
  source 1..20: mol_type = other DNA
ttaaggcgttggacttaaga

SEQ ID NO: 2032 - DNA, 20 bp, synthetic construct
  source 1..20: mol_type = other DNA
taaggcgttggacttaagat

SEQ ID NO: 2033 - DNA, 20 bp, synthetic construct
  source 1..20: mol_type = other DNA
aaggcgttggacttaagatc

SEQ ID NO: 2034 - DNA, 20 bp, synthetic construct
  source 1..20: mol_type = other DNA
aggcgttggacttaagatcc

SEQ ID NO: 2035 - DNA, 20 bp, synthetic construct
  source 1..20: mol_type = other DNA
ggcgttggacttaagatcca

SEQ ID NO: 2036 - DNA, 20 bp, synthetic construct
  source 1..20: mol_type = other DNA
gcgttggacttaagatccaa

SEQ ID NO: 2037 - DNA, 20 bp, synthetic construct
  source 1..20: mol_type = other DNA
cgttggacttaagatccaat

SEQ ID NO: 2038 - DNA, 20 bp, synthetic construct
  source 1..20: mol_type = other DNA
gttggacttaagatccaatg

SEQ ID NO: 2039 - DNA, 20 bp, synthetic construct
  source 1..20: mol_type = other DNA
ttggacttaagatccaatgg

SEQ ID NO: 2040 - DNA, 20 bp, synthetic construct
  source 1..20: mol_type = other DNA
tggacttaagatccaatgga

SEQ ID NO: 2041 - DNA, 20 bp, synthetic construct
  source 1..20: mol_type = other DNA
ggacttaagatccaatggat

SEQ ID NO: 2042 - DNA, 20 bp, synthetic construct
  source 1..20: mol_type = other DNA
gacttaagatccaatggatt

SEQ ID NO: 2043 - DNA, 20 bp, synthetic construct
  source 1..20: mol_type = other DNA
ggttaaggcgttggacttaa

SEQ ID NO: 2044 - DNA, 20 bp, synthetic construct
  source 1..20: mol_type = other DNA
gttaaggcgttggacttaag

SEQ ID NO: 2045 - DNA, 20 bp, synthetic construct
  source 1..20: mol_type = other DNA
ttaaggcgttggacttaaga

SEQ ID NO: 2046 - DNA, 20 bp, synthetic construct
  source 1..20: mol_type = other DNA
taaggcgttggacttaagat

SEQ ID NO: 2047 - DNA, 20 bp, synthetic construct
  source 1..20: mol_type = other DNA
aaggcgttggacttaagatc

SEQ ID NO: 2048 - DNA, 20 bp, synthetic construct
  source 1..20: mol_type = other DNA
aggcgttggacttaagatcc

SEQ ID NO: 2049 - DNA, 20 bp, synthetic construct
  source 1..20: mol_type = other DNA
ggcgttggacttaagatcca

SEQ ID NO: 2050 - DNA, 20 bp, synthetic construct
  source 1..20: mol_type = other DNA
gcgttggacttaagatccaa

SEQ ID NO: 2051 - DNA, 20 bp, synthetic construct
  source 1..20: mol_type = other DNA
cgttggacttaagatccaat

SEQ ID NO: 2052 - DNA, 20 bp, synthetic construct
  source 1..20: mol_type = other DNA
gttggacttaagatccaatg

SEQ ID NO: 2053 - DNA, 20 bp, synthetic construct
  source 1..20: mol_type = other DNA
ttggacttaagatccaatgg

SEQ ID NO: 2054 - DNA, 20 bp, synthetic construct
  source 1..20: mol_type = other DNA
tggacttaagatccaatgga

SEQ ID NO: 2055 - DNA, 20 bp, synthetic construct
  source 1..20: mol_type = other DNA
ggacttaagatccaatggac

SEQ ID NO: 2056 - DNA, 20 bp, synthetic construct
  source 1..20: mol_type = other DNA
gacttaagatccaatggaca

SEQ ID NO: 2057 - DNA, 20 bp, synthetic construct
  source 1..20: mol_type = other DNA
tcgagtccaacgccttaacc

SEQ ID NO: 2058 - DNA, 20 bp, synthetic construct
  source 1..20: mol_type = other DNA
ttcgagtccaacgccttaac

SEQ ID NO: 2059 - DNA, 20 bp, synthetic construct
  source 1..20: mol_type = other DNA
tttcgagtccaacgccttaa

SEQ ID NO: 2060 - DNA, 20 bp, synthetic construct
  source 1..20: mol_type = other DNA
atttcgagtccaacgcctta

SEQ ID NO: 2061 - DNA, 20 bp, synthetic construct
  source 1..20: mol_type = other DNA
gatttcgagtccaacgcctt

SEQ ID NO: 2062 - DNA, 20 bp, synthetic construct
  source 1..20: mol_type = other DNA
ggatttcgagtccaacgcct

SEQ ID NO: 2063 - DNA, 20 bp, synthetic construct
  source 1..20: mol_type = other DNA
tggatttcgagtccaacgcc

SEQ ID NO: 2064 - DNA, 20 bp, synthetic construct
  source 1..20: mol_type = other DNA
ttggatttcgagtccaacgc

SEQ ID NO: 2065 - DNA, 20 bp, synthetic construct
  source 1..20: mol_type = other DNA
attggatttcgagtccaacg

SEQ ID NO: 2066 - DNA, 20 bp, synthetic construct
  source 1..20: mol_type = other DNA
cattggatttcgagtccaac

SEQ ID NO: 2067 - DNA, 20 bp, synthetic construct
  source 1..20: mol_type = other DNA
ccattggatttcgagtccaa

SEQ ID NO: 2068 - DNA, 20 bp, synthetic construct
  source 1..20: mol_type = other DNA
cccattggatttcgagtcca

SEQ ID NO: 2069 - DNA, 20 bp, synthetic construct
  source 1..20: mol_type = other DNA
ccccattggatttcgagtcc

SEQ ID NO: 2070 - DNA, 20 bp, synthetic construct
  source 1..20: mol_type = other DNA
accccattggatttcgagtc

SEQ ID NO: 2071 - DNA, 20 bp, synthetic construct
  source 1..20: mol_type = other DNA
tcgagtccaacgccttaacc

SEQ ID NO: 2072 - DNA, 20 bp, synthetic construct
  source 1..20: mol_type = other DNA
ttcgagtccaacgccttaac

SEQ ID NO: 2073 - DNA, 20 bp, synthetic construct
  source 1..20: mol_type = other DNA
tttcgagtccaacgccttaa

SEQ ID NO: 2074 - DNA, 20 bp, synthetic construct
  source 1..20: mol_type = other DNA
atttcgagtccaacgcctta

SEQ ID NO: 2075 - DNA, 20 bp, synthetic construct
  source 1..20: mol_type = other DNA
gatttcgagtccaacgcctt

SEQ ID NO: 2076 - DNA, 20 bp, synthetic construct
  source 1..20: mol_type = other DNA
ggatttcgagtccaacgcct

SEQ ID NO: 2077 - DNA, 20 bp, synthetic construct
  source 1..20: mol_type = other DNA
tggatttcgagtccaacgcc

SEQ ID NO: 2078 - DNA, 20 bp, synthetic construct
  source 1..20: mol_type = other DNA
ttggatttcgagtccaacgc

SEQ ID NO: 2079 - DNA, 20 bp, synthetic construct
  source 1..20: mol_type = other DNA
attggatttcgagtccaacg

SEQ ID NO: 2080 - DNA, 20 bp, synthetic construct
  source 1..20: mol_type = other DNA
cattggatttcgagtccaac

SEQ ID NO: 2081 - DNA, 20 bp, synthetic construct
  source 1..20: mol_type = other DNA
ccattggatttcgagtccaa

SEQ ID NO: 2082 - DNA, 20 bp, synthetic construct
  source 1..20: mol_type = other DNA
cccattggatttcgagtcca

SEQ ID NO: 2083 - DNA, 20 bp, synthetic construct
  source 1..20: mol_type = other DNA
ccccattggatttcgagtcc

SEQ ID NO: 2084 - DNA, 20 bp, synthetic construct
  source 1..20: mol_type = other DNA
accccattggatttcgagtc

SEQ ID NO: 2085 - DNA, 20 bp, synthetic construct
  source 1..20: mol_type = other DNA
tcgagtccaacaccttaacc

SEQ ID NO: 2086 - DNA, 20 bp, synthetic construct
  source 1..20: mol_type = other DNA
ttcgagtccaacaccttaac

SEQ ID NO: 2087 - DNA, 20 bp, synthetic construct
  source 1..20: mol_type = other DNA
tttcgagtccaacaccttaa

SEQ ID NO: 2088 - DNA, 20 bp, synthetic construct
  source 1..20: mol_type = other DNA
atttcgagtccaacacctta

SEQ ID NO: 2089 - DNA, 20 bp, synthetic construct
  source 1..20: mol_type = other DNA
gatttcgagtccaacacctt

SEQ ID NO: 2090 - DNA, 20 bp, synthetic construct
  source 1..20: mol_type = other DNA
ggatttcgagtccaacacct

SEQ ID NO: 2091 - DNA, 20 bp, synthetic construct
  source 1..20: mol_type = other DNA
tggatttcgagtccaacacc

SEQ ID NO: 2092 - DNA, 20 bp, synthetic construct
  source 1..20: mol_type = other DNA
ttggatttcgagtccaacac

SEQ ID NO: 2093 - DNA, 20 bp, synthetic construct
  source 1..20: mol_type = other DNA
attggatttcgagtccaaca

SEQ ID NO: 2094 - DNA, 20 bp, synthetic construct
  source 1..20: mol_type = other DNA
cattggatttcgagtccaac

SEQ ID NO: 2095 - DNA, 20 bp, synthetic construct
  source 1..20: mol_type = other DNA
ccattggatttcgagtccaa

SEQ ID NO: 2096 - DNA, 20 bp, synthetic construct
  source 1..20: mol_type = other DNA
cccattggatttcgagtcca

SEQ ID NO: 2097 - DNA, 20 bp, synthetic construct
  source 1..20: mol_type = other DNA
ccccattggatttcgagtcc

SEQ ID NO: 2098 - DNA, 20 bp, synthetic construct
  source 1..20: mol_type = other DNA
cccccattggatttcgagtc

SEQ ID NO: 2099 - DNA, 20 bp, synthetic construct
  source 1..20: mol_type = other DNA
tcgagtccaacgccttaacc

SEQ ID NO: 2100 - DNA, 20 bp, synthetic construct
  source 1..20: mol_type = other DNA
ttcgagtccaacgccttaac

SEQ ID NO: 2101 - DNA, 20 bp, synthetic construct
  source 1..20: mol_type = other DNA
tttcgagtccaacgccttaa

SEQ ID NO: 2102 - DNA, 20 bp, synthetic construct
  source 1..20: mol_type = other DNA
atttcgagtccaacgcctta

SEQ ID NO: 2103 - DNA, 20 bp, synthetic construct
  source 1..20: mol_type = other DNA
gatttcgagtccaacgcctt

SEQ ID NO: 2104 - DNA, 20 bp, synthetic construct
  source 1..20: mol_type = other DNA
ggatttcgagtccaacgcct

SEQ ID NO: 2105 - DNA, 20 bp, synthetic construct
  source 1..20: mol_type = other DNA
tggatttcgagtccaacgcc

SEQ ID NO: 2106 - DNA, 20 bp, synthetic construct
  source 1..20: mol_type = other DNA
ttggatttcgagtccaacgc

SEQ ID NO: 2107 - DNA, 20 bp, synthetic construct
  source 1..20: mol_type = other DNA
attggatttcgagtccaacg

SEQ ID NO: 2108 - DNA, 20 bp, synthetic construct
  source 1..20: mol_type = other DNA
cattggatttcgagtccaac

SEQ ID NO: 2109 - DNA, 20 bp, synthetic construct
  source 1..20: mol_type = other DNA
ccattggatttcgagtccaa

SEQ ID NO: 2110 - DNA, 20 bp, synthetic construct
  source 1..20: mol_type = other DNA
cccattggatttcgagtcca

SEQ ID NO: 2111 - DNA, 20 bp, synthetic construct
  source 1..20: mol_type = other DNA
ccccattggatttcgagtcc

SEQ ID NO: 2112 - DNA, 20 bp, synthetic construct
  source 1..20: mol_type = other DNA
accccattggatttcgagtc

SEQ ID NO: 2113 - DNA, 20 bp, synthetic construct
  source 1..20: mol_type = other DNA
tcaagtccaacgccttaacc

SEQ ID NO: 2114 - DNA, 20 bp, synthetic construct
  source 1..20: mol_type = other DNA
ttcaagtccaacgccttaac

SEQ ID NO: 2115 - DNA, 20 bp, synthetic construct
  source 1..20: mol_type = other DNA
tttcaagtccaacgccttaa

SEQ ID NO: 2116 - DNA, 20 bp, synthetic construct
  source 1..20: mol_type = other DNA
atttcaagtccaacgcctta

SEQ ID NO: 2117 - DNA, 20 bp, synthetic construct
  source 1..20: mol_type = other DNA
gatttcaagtccaacgcctt

SEQ ID NO: 2118 - DNA, 20 bp, synthetic construct
  source 1..20: mol_type = other DNA
ggatttcaagtccaacgcct

SEQ ID NO: 2119 - DNA, 20 bp, synthetic construct
  source 1..20: mol_type = other DNA
tggatttcaagtccaacgcc

SEQ ID NO: 2120 - DNA, 20 bp, synthetic construct
  source 1..20: mol_type = other DNA
ttggatttcaagtccaacgc

SEQ ID NO: 2121 - DNA, 20 bp, synthetic construct
  source 1..20: mol_type = other DNA
attggatttcaagtccaacg

SEQ ID NO: 2122 - DNA, 20 bp, synthetic construct
  source 1..20: mol_type = other DNA
cattggatttcaagtccaac

SEQ ID NO: 2123 - DNA, 20 bp, synthetic construct
  source 1..20: mol_type = other DNA
ccattggatttcaagtccaa

SEQ ID NO: 2124 - DNA, 20 bp, synthetic construct
  source 1..20: mol_type = other DNA
cccattggatttcaagtcca

SEQ ID NO: 2125 - DNA, 20 bp, synthetic construct
  source 1..20: mol_type = other DNA
ccccattggatttcaagtcc

SEQ ID NO: 2126 - DNA, 20 bp, synthetic construct
  source 1..20: mol_type = other DNA
accccattggatttcaagtc

SEQ ID NO: 2127 - DNA, 20 bp, synthetic construct
  source 1..20: mol_type = other DNA
tcaagtccatcgccttaacc

SEQ ID NO: 2128 - DNA, 20 bp, synthetic construct
  source 1..20: mol_type = other DNA
ttcaagtccatcgccttaac

SEQ ID NO: 2129 - DNA, 20 bp, synthetic construct
  source 1..20: mol_type = other DNA
tttcaagtccatcgccttaa

SEQ ID NO: 2130 - DNA, 20 bp, synthetic construct
  source 1..20: mol_type = other DNA
atttcaagtccatcgcctta

SEQ ID NO: 2131 - DNA, 20 bp, synthetic construct
  source 1..20: mol_type = other DNA
gatttcaagtccatcgcctt

SEQ ID NO: 2132 - DNA, 20 bp, synthetic construct
  source 1..20: mol_type = other DNA
ggatttcaagtccatcgcct

SEQ ID NO: 2133 - DNA, 20 bp, synthetic construct
  source 1..20: mol_type = other DNA
tggatttcaagtccatcgcc

SEQ ID NO: 2134 - DNA, 20 bp, synthetic construct
  source 1..20: mol_type = other DNA
atggatttcaagtccatcgc

SEQ ID NO: 2135 - DNA, 20 bp, synthetic construct
  source 1..20: mol_type = other DNA
aatggatttcaagtccatcg

SEQ ID NO: 2136 - DNA, 20 bp, synthetic construct
  source 1..20: mol_type = other DNA
caatggatttcaagtccatc

SEQ ID NO: 2137 - DNA, 20 bp, synthetic construct
  source 1..20: mol_type = other DNA
ccaatggatttcaagtccat

SEQ ID NO: 2138 - DNA, 20 bp, synthetic construct
  source 1..20: mol_type = other DNA
cccaatggatttcaagtcca

SEQ ID NO: 2139 - DNA, 20 bp, synthetic construct
  source 1..20: mol_type = other DNA
ccccaatggatttcaagtcc

SEQ ID NO: 2140 - DNA, 20 bp, synthetic construct
  source 1..20: mol_type = other DNA
accccaatggatttcaagtc

SEQ ID NO: 2141 - DNA, 20 bp, synthetic construct
  source 1..20: mol_type = other DNA
tcaagtccatcgccttaacc

SEQ ID NO: 2142 - DNA, 20 bp, synthetic construct
  source 1..20: mol_type = other DNA
ttcaagtccatcgccttaac

SEQ ID NO: 2143 - DNA, 20 bp, synthetic construct
  source 1..20: mol_type = other DNA
tttcaagtccatcgccttaa

SEQ ID NO: 2144 - DNA, 20 bp, synthetic construct
  source 1..20: mol_type = other DNA
atttcaagtccatcgcctta

SEQ ID NO: 2145 - DNA, 20 bp, synthetic construct
  source 1..20: mol_type = other DNA
gatttcaagtccatcgcctt

SEQ ID NO: 2146 - DNA, 20 bp, synthetic construct
  source 1..20: mol_type = other DNA
ggatttcaagtccatcgcct

SEQ ID NO: 2147 - DNA, 20 bp, synthetic construct
  source 1..20: mol_type = other DNA
tggatttcaagtccatcgcc

SEQ ID NO: 2148 - DNA, 20 bp, synthetic construct
  source 1..20: mol_type = other DNA
atggatttcaagtccatcgc

SEQ ID NO: 2149 - DNA, 20 bp, synthetic construct
  source 1..20: mol_type = other DNA
aatggatttcaagtccatcg

SEQ ID NO: 2150 - DNA, 20 bp, synthetic construct
  source 1..20: mol_type = other DNA
caatggatttcaagtccatc

SEQ ID NO: 2151 - DNA, 20 bp, synthetic construct
  source 1..20: mol_type = other DNA
ccaatggatttcaagtccat

SEQ ID NO: 2152 - DNA, 20 bp, synthetic construct
  source 1..20: mol_type = other DNA
cccaatggatttcaagtcca

SEQ ID NO: 2153 - DNA, 20 bp, synthetic construct
  source 1..20: mol_type = other DNA
ccccaatggatttcaagtcc

SEQ ID NO: 2154 - DNA, 20 bp, synthetic construct
  source 1..20: mol_type = other DNA
accccaatggatttcaagtc

SEQ ID NO: 2155 - DNA, 20 bp, synthetic construct
  source 1..20: mol_type = other DNA
tcaagtccatcgccttaacc

SEQ ID NO: 2156 - DNA, 20 bp, synthetic construct
  source 1..20: mol_type = other DNA
ttcaagtccatcgccttaac

SEQ ID NO: 2157 - DNA, 20 bp, synthetic construct
  source 1..20: mol_type = other DNA
tttcaagtccatcgccttaa

SEQ ID NO: 2158 - DNA, 20 bp, synthetic construct
  source 1..20: mol_type = other DNA
atttcaagtccatcgcctta

SEQ ID NO: 2159 - DNA, 20 bp, synthetic construct
  source 1..20: mol_type = other DNA
gatttcaagtccatcgcctt

SEQ ID NO: 2160 - DNA, 20 bp, synthetic construct
  source 1..20: mol_type = other DNA
ggatttcaagtccatcgcct

SEQ ID NO: 2161 - DNA, 20 bp, synthetic construct
  source 1..20: mol_type = other DNA
tggatttcaagtccatcgcc

SEQ ID NO: 2162 - DNA, 20 bp, synthetic construct
  source 1..20: mol_type = other DNA
atggatttcaagtccatcgc

SEQ ID NO: 2163 - DNA, 20 bp, synthetic construct
  source 1..20: mol_type = other DNA
aatggatttcaagtccatcg

SEQ ID NO: 2164 - DNA, 20 bp, synthetic construct
  source 1..20: mol_type = other DNA
caatggatttcaagtccatc

SEQ ID NO: 2165 - DNA, 20 bp, synthetic construct
  source 1..20: mol_type = other DNA
ccaatggatttcaagtccat

SEQ ID NO: 2166 - DNA, 20 bp, synthetic construct
  source 1..20: mol_type = other DNA
cccaatggatttcaagtcca

SEQ ID NO: 2167 - DNA, 20 bp, synthetic construct
  source 1..20: mol_type = other DNA
ccccaatggatttcaagtcc

SEQ ID NO: 2168 - DNA, 20 bp, synthetic construct
  source 1..20: mol_type = other DNA
accccaatggatttcaagtc

SEQ ID NO: 2169 - DNA, 20 bp, synthetic construct
  source 1..20: mol_type = other DNA
acggtagcgcgtctgactcc

SEQ ID NO: 2170 - DNA, 20 bp, synthetic construct
  source 1..20: mol_type = other DNA
cggtagcgcgtctgactcca

SEQ ID NO: 2171 - DNA, 20 bp, synthetic construct
  source 1..20: mol_type = other DNA
ggtagcgcgtctgactccag

SEQ ID NO: 2172 - DNA, 20 bp, synthetic construct
  source 1..20: mol_type = other DNA
gtagcgcgtctgactccaga

SEQ ID NO: 2173 - DNA, 20 bp, synthetic construct
  source 1..20: mol_type = other DNA
tagcgcgtctgactccagat

SEQ ID NO: 2174 - DNA, 20 bp, synthetic construct
  source 1..20: mol_type = other DNA
agcgcgtctgactccagatc

SEQ ID NO: 2175 - DNA, 20 bp, synthetic construct
  source 1..20: mol_type = other DNA
gcgcgtctgactccagatca

SEQ ID NO: 2176 - DNA, 20 bp, synthetic construct
  source 1..20: mol_type = other DNA
cgcgtctgactccagatcag

SEQ ID NO: 2177 - DNA, 20 bp, synthetic construct
  source 1..20: mol_type = other DNA
gcgtctgactccagatcaga

SEQ ID NO: 2178 - DNA, 20 bp, synthetic construct
  source 1..20: mol_type = other DNA
cgtctgactccagatcagaa

SEQ ID NO: 2179 - DNA, 20 bp, synthetic construct
  source 1..20: mol_type = other DNA
gtctgactccagatcagaag

SEQ ID NO: 2180 - DNA, 20 bp, synthetic construct
  source 1..20: mol_type = other DNA
tctgactccagatcagaagg

SEQ ID NO: 2181 - DNA, 20 bp, synthetic construct
  source 1..20: mol_type = other DNA
ctgactccagatcagaaggt

SEQ ID NO: 2182 - DNA, 20 bp, synthetic construct
  source 1..20: mol_type = other DNA
tgactccagatcagaaggtt

SEQ ID NO: 2183 - DNA, 20 bp, synthetic construct
  source 1..20: mol_type = other DNA
gactccagatcagaaggttg

SEQ ID NO: 2184 - DNA, 20 bp, synthetic construct
  source 1..20: mol_type = other DNA
actccagatcagaaggttgc

SEQ ID NO: 2185 - DNA, 20 bp, synthetic construct
  source 1..20: mol_type = other DNA
ctccagatcagaaggttgcg

SEQ ID NO: 2186 - DNA, 20 bp, synthetic construct
  source 1..20: mol_type = other DNA
tccagatcagaaggttgcgt

SEQ ID NO: 2187 - DNA, 20 bp, synthetic construct
  source 1..20: mol_type = other DNA
atggtagcgcgtctgactcc

SEQ ID NO: 2188 - DNA, 20 bp, synthetic construct
  source 1..20: mol_type = other DNA
tggtagcgcgtctgactcca

SEQ ID NO: 2189 - DNA, 20 bp, synthetic construct
  source 1..20: mol_type = other DNA
ggtagcgcgtctgactccag

SEQ ID NO: 2190 - DNA, 20 bp, synthetic construct
  source 1..20: mol_type = other DNA
gtagcgcgtctgactccaga

SEQ ID NO: 2191 - DNA, 20 bp, synthetic construct
  source 1..20: mol_type = other DNA
tagcgcgtctgactccagat

SEQ ID NO: 2192 - DNA, 20 bp, synthetic construct
  source 1..20: mol_type = other DNA
agcgcgtctgactccagatc

SEQ ID NO: 2193 - DNA, 20 bp, synthetic construct
  source 1..20: mol_type = other DNA
gcgcgtctgactccagatca

SEQ ID NO: 2194 - DNA, 20 bp, synthetic construct
  source 1..20: mol_type = other DNA
cgcgtctgactccagatcag

SEQ ID NO: 2195 - DNA, 20 bp, synthetic construct
  source 1..20: mol_type = other DNA
gcgtctgactccagatcaga

SEQ ID NO: 2196 - DNA, 20 bp, synthetic construct
  source 1..20: mol_type = other DNA
cgtctgactccagatcagaa

SEQ ID NO: 2197 - DNA, 20 bp, synthetic construct
  source 1..20: mol_type = other DNA
gtctgactccagatcagaag

SEQ ID NO: 2198 - DNA, 20 bp, synthetic construct
  source 1..20: mol_type = other DNA
tctgactccagatcagaagg

SEQ ID NO: 2199 - DNA, 20 bp, synthetic construct
  source 1..20: mol_type = other DNA
ctgactccagatcagaaggt

SEQ ID NO: 2200 - DNA, 20 bp, synthetic construct
  source 1..20: mol_type = other DNA
tgactccagatcagaaggtt

SEQ ID NO: 2201 - DNA, 20 bp, synthetic construct
  source 1..20: mol_type = other DNA
gactccagatcagaaggttg

SEQ ID NO: 2202 - DNA, 20 bp, synthetic construct
  source 1..20: mol_type = other DNA
actccagatcagaaggttgc

SEQ ID NO: 2203 - DNA, 20 bp, synthetic construct
  source 1..20: mol_type = other DNA
ctccagatcagaaggttgcg

SEQ ID NO: 2204 - DNA, 20 bp, synthetic construct
  source 1..20: mol_type = other DNA
tccagatcagaaggttgcgt

SEQ ID NO: 2205 - DNA, 20 bp, synthetic construct
  source 1..20: mol_type = other DNA
acggtagcgcgtctgactcc

SEQ ID NO: 2206 - DNA, 20 bp, synthetic construct
  source 1..20: mol_type = other DNA
cggtagcgcgtctgactcca

SEQ ID NO: 2207 - DNA, 20 bp, synthetic construct
  source 1..20: mol_type = other DNA
ggtagcgcgtctgactccag

SEQ ID NO: 2208 - DNA, 20 bp, synthetic construct
  source 1..20: mol_type = other DNA
gtagcgcgtctgactccaga

SEQ ID NO: 2209 - DNA, 20 bp, synthetic construct
  source 1..20: mol_type = other DNA
tagcgcgtctgactccagat

SEQ ID NO: 2210 - DNA, 20 bp, synthetic construct
  source 1..20: mol_type = other DNA
agcgcgtctgactccagatc

SEQ ID NO: 2211 - DNA, 20 bp, synthetic construct
  source 1..20: mol_type = other DNA
gcgcgtctgactccagatca

SEQ ID NO: 2212 - DNA, 20 bp, synthetic construct
  source 1..20: mol_type = other DNA
cgcgtctgactccagatcag

SEQ ID NO: 2213 - DNA, 20 bp, synthetic construct
  source 1..20: mol_type = other DNA
gcgtctgactccagatcaga

SEQ ID NO: 2214 - DNA, 20 bp, synthetic construct
  source 1..20: mol_type = other DNA
cgtctgactccagatcagaa

SEQ ID NO: 2215 - DNA, 20 bp, synthetic construct
  source 1..20: mol_type = other DNA
gtctgactccagatcagaag

SEQ ID NO: 2216 - DNA, 20 bp, synthetic construct
  source 1..20: mol_type = other DNA
tctgactccagatcagaagg

SEQ ID NO: 2217 - DNA, 20 bp, synthetic construct
  source 1..20: mol_type = other DNA
ctgactccagatcagaaggt

SEQ ID NO: 2218 - DNA, 20 bp, synthetic construct
  source 1..20: mol_type = other DNA
tgactccagatcagaaggtt

SEQ ID NO: 2219 - DNA, 20 bp, synthetic construct
  source 1..20: mol_type = other DNA
gactccagatcagaaggttg

SEQ ID NO: 2220 - DNA, 20 bp, synthetic construct
  source 1..20: mol_type = other DNA
actccagatcagaaggttgc

SEQ ID NO: 2221 - DNA, 20 bp, synthetic construct
  source 1..20: mol_type = other DNA
ctccagatcagaaggttgcg

SEQ ID NO: 2222 - DNA, 20 bp, synthetic construct
  source 1..20: mol_type = other DNA
tccagatcagaaggttgcgt

SEQ ID NO: 2223 - DNA, 20 bp, synthetic construct
  source 1..20: mol_type = other DNA
acggtagcgcgtctgactcc

SEQ ID NO: 2224 - DNA, 20 bp, synthetic construct
  source 1..20: mol_type = other DNA
cggtagcgcgtctgactcca

SEQ ID NO: 2225 - DNA, 20 bp, synthetic construct
  source 1..20: mol_type = other DNA
ggtagcgcgtctgactccag

SEQ ID NO: 2226 - DNA, 20 bp, synthetic construct
  source 1..20: mol_type = other DNA
gtagcgcgtctgactccaga

SEQ ID NO: 2227 - DNA, 20 bp, synthetic construct
  source 1..20: mol_type = other DNA
tagcgcgtctgactccagat

SEQ ID NO: 2228 - DNA, 20 bp, synthetic construct
  source 1..20: mol_type = other DNA
agcgcgtctgactccagatc

SEQ ID NO: 2229 - DNA, 20 bp, synthetic construct
  source 1..20: mol_type = other DNA
gcgcgtctgactccagatca

SEQ ID NO: 2230 - DNA, 20 bp, synthetic construct
  source 1..20: mol_type = other DNA
cgcgtctgactccagatcag

SEQ ID NO: 2231 - DNA, 20 bp, synthetic construct
  source 1..20: mol_type = other DNA
gcgtctgactccagatcaga

SEQ ID NO: 2232 - DNA, 20 bp, synthetic construct
  source 1..20: mol_type = other DNA
cgtctgactccagatcagaa

SEQ ID NO: 2233 - DNA, 20 bp, synthetic construct
  source 1..20: mol_type = other DNA
gtctgactccagatcagaag

SEQ ID NO: 2234 - DNA, 20 bp, synthetic construct
  source 1..20: mol_type = other DNA
tctgactccagatcagaagg

SEQ ID NO: 2235 - DNA, 20 bp, synthetic construct
  source 1..20: mol_type = other DNA
ctgactccagatcagaaggt

SEQ ID NO: 2236 - DNA, 20 bp, synthetic construct
  source 1..20: mol_type = other DNA
tgactccagatcagaaggtt

SEQ ID NO: 2237 - DNA, 20 bp, synthetic construct
  source 1..20: mol_type = other DNA
gactccagatcagaaggttg

SEQ ID NO: 2238 - DNA, 20 bp, synthetic construct
  source 1..20: mol_type = other DNA
actccagatcagaaggttgc

SEQ ID NO: 2239 - DNA, 20 bp, synthetic construct
  source 1..20: mol_type = other DNA
ctccagatcagaaggttgcg

SEQ ID NO: 2240 - DNA, 20 bp, synthetic construct
  source 1..20: mol_type = other DNA
tccagatcagaaggttgcgt

SEQ ID NO: 2241 - DNA, 20 bp, synthetic construct
  source 1..20: mol_type = other DNA
acggtagcgcgtctgactcc

SEQ ID NO: 2242 - DNA, 20 bp, synthetic construct
  source 1..20: mol_type = other DNA
cggtagcgcgtctgactcca

SEQ ID NO: 2243 - DNA, 20 bp, synthetic construct
  source 1..20: mol_type = other DNA
ggtagcgcgtctgactccag

SEQ ID NO: 2244 - DNA, 20 bp, synthetic construct
  source 1..20: mol_type = other DNA
gtagcgcgtctgactccaga

SEQ ID NO: 2245 - DNA, 20 bp, synthetic construct
  source 1..20: mol_type = other DNA
tagcgcgtctgactccagat

SEQ ID NO: 2246 - DNA, 20 bp, synthetic construct
  source 1..20: mol_type = other DNA
agcgcgtctgactccagatc

SEQ ID NO: 2247 - DNA, 20 bp, synthetic construct
  source 1..20: mol_type = other DNA
gcgcgtctgactccagatca

SEQ ID NO: 2248 - DNA, 20 bp, synthetic construct
  source 1..20: mol_type = other DNA
cgcgtctgactccagatcag

SEQ ID NO: 2249 - DNA, 20 bp, synthetic construct
  source 1..20: mol_type = other DNA
gcgtctgactccagatcaga

SEQ ID NO: 2250 - DNA, 20 bp, synthetic construct
  source 1..20: mol_type = other DNA
cgtctgactccagatcagaa

SEQ ID NO: 2251 - DNA, 20 bp, synthetic construct
  source 1..20: mol_type = other DNA
gtctgactccagatcagaag

SEQ ID NO: 2252 - DNA, 20 bp, synthetic construct
  source 1..20: mol_type = other DNA
tctgactccagatcagaagg

SEQ ID NO: 2253 - DNA, 20 bp, synthetic construct
  source 1..20: mol_type = other DNA
ctgactccagatcagaaggt

SEQ ID NO: 2254 - DNA, 20 bp, synthetic construct
  source 1..20: mol_type = other DNA
tgactccagatcagaaggtt

SEQ ID NO: 2255 - DNA, 20 bp, synthetic construct
  source 1..20: mol_type = other DNA
gactccagatcagaaggttg

SEQ ID NO: 2256 - DNA, 20 bp, synthetic construct
  source 1..20: mol_type = other DNA
actccagatcagaaggttgc

SEQ ID NO: 2257 - DNA, 20 bp, synthetic construct
  source 1..20: mol_type = other DNA
ctccagatcagaaggttgcg

SEQ ID NO: 2258 - DNA, 20 bp, synthetic construct
  source 1..20: mol_type = other DNA
tccagatcagaaggttgcgt

SEQ ID NO: 2259 - DNA, 20 bp, synthetic construct
  source 1..20: mol_type = other DNA
acggtagcgcgtctgactcc

SEQ ID NO: 2260 - DNA, 20 bp, synthetic construct
  source 1..20: mol_type = other DNA
cggtagcgcgtctgactcca

SEQ ID NO: 2261 - DNA, 20 bp, synthetic construct
  source 1..20: mol_type = other DNA
ggtagcgcgtctgactccag

SEQ ID NO: 2262 - DNA, 20 bp, synthetic construct
  source 1..20: mol_type = other DNA
gtagcgcgtctgactccaga

SEQ ID NO: 2263 - DNA, 20 bp, synthetic construct
  source 1..20: mol_type = other DNA
tagcgcgtctgactccagat

SEQ ID NO: 2264 - DNA, 20 bp, synthetic construct
  source 1..20: mol_type = other DNA
agcgcgtctgactccagatc

SEQ ID NO: 2265 - DNA, 20 bp, synthetic construct
  source 1..20: mol_type = other DNA
gcgcgtctgactccagatca

SEQ ID NO: 2266 - DNA, 20 bp, synthetic construct
  source 1..20: mol_type = other DNA
cgcgtctgactccagatcag

SEQ ID NO: 2267 - DNA, 20 bp, synthetic construct
  source 1..20: mol_type = other DNA
gcgtctgactccagatcaga

SEQ ID NO: 2268 - DNA, 20 bp, synthetic construct
  source 1..20: mol_type = other DNA
cgtctgactccagatcagaa

SEQ ID NO: 2269 - DNA, 20 bp, synthetic construct
  source 1..20: mol_type = other DNA
gtctgactccagatcagaag

SEQ ID NO: 2270 - DNA, 20 bp, synthetic construct
  source 1..20: mol_type = other DNA
tctgactccagatcagaagg

SEQ ID NO: 2271 - DNA, 20 bp, synthetic construct
  source 1..20: mol_type = other DNA
ctgactccagatcagaaggc

SEQ ID NO: 2272 - DNA, 20 bp, synthetic construct
  source 1..20: mol_type = other DNA
tgactccagatcagaaggct

SEQ ID NO: 2273 - DNA, 20 bp, synthetic construct
  source 1..20: mol_type = other DNA
gactccagatcagaaggctg

SEQ ID NO: 2274 - DNA, 20 bp, synthetic construct
  source 1..20: mol_type = other DNA
actccagatcagaaggctgc

SEQ ID NO: 2275 - DNA, 20 bp, synthetic construct
  source 1..20: mol_type = other DNA
ctccagatcagaaggctgcg

SEQ ID NO: 2276 - DNA, 20 bp, synthetic construct
  source 1..20: mol_type = other DNA
tccagatcagaaggctgcgt

SEQ ID NO: 2277 - DNA, 20 bp, synthetic construct
  source 1..20: mol_type = other DNA
acggcagcgcgtctgactcc

SEQ ID NO: 2278 - DNA, 20 bp, synthetic construct
  source 1..20: mol_type = other DNA
cggcagcgcgtctgactcca

SEQ ID NO: 2279 - DNA, 20 bp, synthetic construct
  source 1..20: mol_type = other DNA
ggcagcgcgtctgactccag

SEQ ID NO: 2280 - DNA, 20 bp, synthetic construct
  source 1..20: mol_type = other DNA
gcagcgcgtctgactccaga

SEQ ID NO: 2281 - DNA, 20 bp, synthetic construct
  source 1..20: mol_type = other DNA
cagcgcgtctgactccagat

SEQ ID NO: 2282 - DNA, 20 bp, synthetic construct
  source 1..20: mol_type = other DNA
agcgcgtctgactccagatc

SEQ ID NO: 2283 - DNA, 20 bp, synthetic construct
  source 1..20: mol_type = other DNA
gcgcgtctgactccagatca

SEQ ID NO: 2284 - DNA, 20 bp, synthetic construct
  source 1..20: mol_type = other DNA
cgcgtctgactccagatcag

SEQ ID NO: 2285 - DNA, 20 bp, synthetic construct
  source 1..20: mol_type = other DNA
gcgtctgactccagatcaga

SEQ ID NO: 2286 - DNA, 20 bp, synthetic construct
  source 1..20: mol_type = other DNA
cgtctgactccagatcagaa

SEQ ID NO: 2287 - DNA, 20 bp, synthetic construct
  source 1..20: mol_type = other DNA
gtctgactccagatcagaag

SEQ ID NO: 2288 - DNA, 20 bp, synthetic construct
  source 1..20: mol_type = other DNA
tctgactccagatcagaagg

SEQ ID NO: 2289 - DNA, 20 bp, synthetic construct
  source 1..20: mol_type = other DNA
ctgactccagatcagaaggt

SEQ ID NO: 2290 - DNA, 20 bp, synthetic construct
  source 1..20: mol_type = other DNA
tgactccagatcagaaggtt

SEQ ID NO: 2291 - DNA, 20 bp, synthetic construct
  source 1..20: mol_type = other DNA
gactccagatcagaaggttg

SEQ ID NO: 2292 - DNA, 20 bp, synthetic construct
  source 1..20: mol_type = other DNA
actccagatcagaaggttgc

SEQ ID NO: 2293 - DNA, 20 bp, synthetic construct
  source 1..20: mol_type = other DNA
ctccagatcagaaggttgcg

SEQ ID NO: 2294 - DNA, 20 bp, synthetic construct
  source 1..20: mol_type = other DNA
tccagatcagaaggttgcgt

SEQ ID NO: 2295 - DNA, 20 bp, synthetic construct
  source 1..20: mol_type = other DNA
tggtagagcagaggactata

SEQ ID NO: 2296 - DNA, 20 bp, synthetic construct
  source 1..20: mol_type = other DNA
ggtagagcagaggactatag

SEQ ID NO: 2297 - DNA, 20 bp, synthetic construct
  source 1..20: mol_type = other DNA
gtagagcagaggactatagc

SEQ ID NO: 2298 - DNA, 20 bp, synthetic construct
  source 1..20: mol_type = other DNA
tagagcagaggactatagct

SEQ ID NO: 2299 - DNA, 20 bp, synthetic construct
  source 1..20: mol_type = other DNA
agagcagaggactatagcta

SEQ ID NO: 2300 - DNA, 20 bp, synthetic construct
  source 1..20: mol_type = other DNA
gagcagaggactatagctac

SEQ ID NO: 2301 - DNA, 20 bp, synthetic construct
  source 1..20: mol_type = other DNA
agcagaggactatagctact

SEQ ID NO: 2302 - DNA, 20 bp, synthetic construct
  source 1..20: mol_type = other DNA
gcagaggactatagctactt

SEQ ID NO: 2303 - DNA, 20 bp, synthetic construct
  source 1..20: mol_type = other DNA
cagaggactatagctacttc

SEQ ID NO: 2304 - DNA, 20 bp, synthetic construct
  source 1..20: mol_type = other DNA
agaggactatagctacttcc

SEQ ID NO: 2305 - DNA, 20 bp, synthetic construct
  source 1..20: mol_type = other DNA
gaggactatagctacttcct

SEQ ID NO: 2306 - DNA, 20 bp, synthetic construct
  source 1..20: mol_type = other DNA
aggactatagctacttcctc

SEQ ID NO: 2307 - DNA, 20 bp, synthetic construct
  source 1..20: mol_type = other DNA
ggactatagctacttcctca

SEQ ID NO: 2308 - DNA, 20 bp, synthetic construct
  source 1..20: mol_type = other DNA
gactatagctacttcctcag

SEQ ID NO: 2309 - DNA, 20 bp, synthetic construct
  source 1..20: mol_type = other DNA
tacagtcctccgctctacca

SEQ ID NO: 2310 - DNA, 20 bp, synthetic construct
  source 1..20: mol_type = other DNA
ctacagtcctccgctctacc

SEQ ID NO: 2311 - DNA, 20 bp, synthetic construct
  source 1..20: mol_type = other DNA
actacagtcctccgctctac

SEQ ID NO: 2312 - DNA, 20 bp, synthetic construct
  source 1..20: mol_type = other DNA
aactacagtcctccgctcta

SEQ ID NO: 2313 - DNA, 20 bp, synthetic construct
  source 1..20: mol_type = other DNA
caactacagtcctccgctct

SEQ ID NO: 2314 - DNA, 20 bp, synthetic construct
  source 1..20: mol_type = other DNA
ccaactacagtcctccgctc

SEQ ID NO: 2315 - DNA, 20 bp, synthetic construct
  source 1..20: mol_type = other DNA
gccaactacagtcctccgct

SEQ ID NO: 2316 - DNA, 20 bp, synthetic construct
  source 1..20: mol_type = other DNA
agccaactacagtcctccgc

SEQ ID NO: 2317 - DNA, 20 bp, synthetic construct
  source 1..20: mol_type = other DNA
cagccaactacagtcctccg

SEQ ID NO: 2318 - DNA, 20 bp, synthetic construct
  source 1..20: mol_type = other DNA
acagccaactacagtcctcc

SEQ ID NO: 2319 - DNA, 20 bp, synthetic construct
  source 1..20: mol_type = other DNA
cacagccaactacagtcctc

SEQ ID NO: 2320 - DNA, 20 bp, synthetic construct
  source 1..20: mol_type = other DNA
acacagccaactacagtcct

SEQ ID NO: 2321 - DNA, 20 bp, synthetic construct
  source 1..20: mol_type = other DNA
gacacagccaactacagtcc

SEQ ID NO: 2322 - DNA, 20 bp, synthetic construct
  source 1..20: mol_type = other DNA
ggacacagccaactacagtc

SEQ ID NO: 2323 - DNA, 20 bp, synthetic construct
  source 1..20: mol_type = other DNA
tacagtcctccgctctacca

SEQ ID NO: 2324 - DNA, 20 bp, synthetic construct
  source 1..20: mol_type = other DNA
ctacagtcctccgctctacc

SEQ ID NO: 2325 - DNA, 20 bp, synthetic construct
  source 1..20: mol_type = other DNA
actacagtcctccgctctac

SEQ ID NO: 2326 - DNA, 20 bp, synthetic construct
  source 1..20: mol_type = other DNA
cactacagtcctccgctcta

SEQ ID NO: 2327 - DNA, 20 bp, synthetic construct
  source 1..20: mol_type = other DNA
ccactacagtcctccgctct

SEQ ID NO: 2328 - DNA, 20 bp, synthetic construct
  source 1..20: mol_type = other DNA
tccactacagtcctccgctc

SEQ ID NO: 2329 - DNA, 20 bp, synthetic construct
  source 1..20: mol_type = other DNA
atccactacagtcctccgct

SEQ ID NO: 2330 - DNA, 20 bp, synthetic construct
  source 1..20: mol_type = other DNA
tatccactacagtcctccgc

SEQ ID NO: 2331 - DNA, 20 bp, synthetic construct
  source 1..20: mol_type = other DNA
ctatccactacagtcctccg

SEQ ID NO: 2332 - DNA, 20 bp, synthetic construct
  source 1..20: mol_type = other DNA
cctatccactacagtcctcc

SEQ ID NO: 2333 - DNA, 20 bp, synthetic construct
  source 1..20: mol_type = other DNA
ccctatccactacagtcctc

SEQ ID NO: 2334 - DNA, 20 bp, synthetic construct
  source 1..20: mol_type = other DNA
gccctatccactacagtcct

SEQ ID NO: 2335 - DNA, 20 bp, synthetic construct
  source 1..20: mol_type = other DNA
cgccctatccactacagtcc

SEQ ID NO: 2336 - DNA, 20 bp, synthetic construct
  source 1..20: mol_type = other DNA
acgccctatccactacagtc

SEQ ID NO: 2337 - DNA, 20 bp, synthetic construct
  source 1..20: mol_type = other DNA
tacagtcctccgctctacca

SEQ ID NO: 2338 - DNA, 20 bp, synthetic construct
  source 1..20: mol_type = other DNA
ctacagtcctccgctctacc

SEQ ID NO: 2339 - DNA, 20 bp, synthetic construct
  source 1..20: mol_type = other DNA
cctacagtcctccgctctac

SEQ ID NO: 2340 - DNA, 20 bp, synthetic construct
  source 1..20: mol_type = other DNA
gcctacagtcctccgctcta

SEQ ID NO: 2341 - DNA, 20 bp, synthetic construct
  source 1..20: mol_type = other DNA
agcctacagtcctccgctct

SEQ ID NO: 2342 - DNA, 20 bp, synthetic construct
  source 1..20: mol_type = other DNA
gagcctacagtcctccgctc

SEQ ID NO: 2343 - DNA, 20 bp, synthetic construct
  source 1..20: mol_type = other DNA
tgagcctacagtcctccgct

SEQ ID NO: 2344 - DNA, 20 bp, synthetic construct
  source 1..20: mol_type = other DNA
atgagcctacagtcctccgc

SEQ ID NO: 2345 - DNA, 20 bp, synthetic construct
  source 1..20: mol_type = other DNA
aatgagcctacagtcctccg

SEQ ID NO: 2346 - DNA, 20 bp, synthetic construct
  source 1..20: mol_type = other DNA
taatgagcctacagtcctcc

SEQ ID NO: 2347 - DNA, 20 bp, synthetic construct
  source 1..20: mol_type = other DNA
ttaatgagcctacagtcctc

SEQ ID NO: 2348 - DNA, 20 bp, synthetic construct
  source 1..20: mol_type = other DNA
cttaatgagcctacagtcct

SEQ ID NO: 2349 - DNA, 20 bp, synthetic construct
  source 1..20: mol_type = other DNA
gcttaatgagcctacagtcc

SEQ ID NO: 2350 - DNA, 20 bp, synthetic construct
  source 1..20: mol_type = other DNA
tgcttaatgagcctacagtc

SEQ ID NO: 2351 - DNA, 20 bp, synthetic construct
  source 1..20: mol_type = other DNA
tacagtcctccgctctacca

SEQ ID NO: 2352 - DNA, 20 bp, synthetic construct
  source 1..20: mol_type = other DNA
ctacagtcctccgctctacc

SEQ ID NO: 2353 - DNA, 20 bp, synthetic construct
  source 1..20: mol_type = other DNA
tctacagtcctccgctctac

SEQ ID NO: 2354 - DNA, 20 bp, synthetic construct
  source 1..20: mol_type = other DNA
atctacagtcctccgctcta

SEQ ID NO: 2355 - DNA, 20 bp, synthetic construct
  source 1..20: mol_type = other DNA
aatctacagtcctccgctct

SEQ ID NO: 2356 - DNA, 20 bp, synthetic construct
  source 1..20: mol_type = other DNA
caatctacagtcctccgctc

SEQ ID NO: 2357 - DNA, 20 bp, synthetic construct
  source 1..20: mol_type = other DNA
acaatctacagtcctccgct

SEQ ID NO: 2358 - DNA, 20 bp, synthetic construct
  source 1..20: mol_type = other DNA
tacaatctacagtcctccgc

SEQ ID NO: 2359 - DNA, 20 bp, synthetic construct
  source 1..20: mol_type = other DNA
atacaatctacagtcctccg

SEQ ID NO: 2360 - DNA, 20 bp, synthetic construct
  source 1..20: mol_type = other DNA
tatacaatctacagtcctcc

SEQ ID NO: 2361 - DNA, 20 bp, synthetic construct
  source 1..20: mol_type = other DNA
ctatacaatctacagtcctc

SEQ ID NO: 2362 - DNA, 20 bp, synthetic construct
  source 1..20: mol_type = other DNA
tctatacaatctacagtcct

SEQ ID NO: 2363 - DNA, 20 bp, synthetic construct
  source 1..20: mol_type = other DNA
gtctatacaatctacagtcc

SEQ ID NO: 2364 - DNA, 20 bp, synthetic construct
  source 1..20: mol_type = other DNA
tgtctatacaatctacagtc

SEQ ID NO: 2365 - DNA, 20 bp, synthetic construct
  source 1..20: mol_type = other DNA
tacagtcctccgctctacca

SEQ ID NO: 2366 - DNA, 20 bp, synthetic construct
  source 1..20: mol_type = other DNA
ctacagtcctccgctctacc

SEQ ID NO: 2367 - DNA, 20 bp, synthetic construct
  source 1..20: mol_type = other DNA
gctacagtcctccgctctac

SEQ ID NO: 2368 - DNA, 20 bp, synthetic construct
  source 1..20: mol_type = other DNA
agctacagtcctccgctcta

SEQ ID NO: 2369 - DNA, 20 bp, synthetic construct
  source 1..20: mol_type = other DNA
tagctacagtcctccgctct

SEQ ID NO: 2370 - DNA, 20 bp, synthetic construct
  source 1..20: mol_type = other DNA
gtagctacagtcctccgctc

SEQ ID NO: 2371 - DNA, 20 bp, synthetic construct
  source 1..20: mol_type = other DNA
agtagctacagtcctccgct

SEQ ID NO: 2372 - DNA, 20 bp, synthetic construct
  source 1..20: mol_type = other DNA
aagtagctacagtcctccgc

SEQ ID NO: 2373 - DNA, 20 bp, synthetic construct
  source 1..20: mol_type = other DNA
gaagtagctacagtcctccg

SEQ ID NO: 2374 - DNA, 20 bp, synthetic construct
  source 1..20: mol_type = other DNA
ggaagtagctacagtcctcc

SEQ ID NO: 2375 - DNA, 20 bp, synthetic construct
  source 1..20: mol_type = other DNA
aggaagtagctacagtcctc

SEQ ID NO: 2376 - DNA, 20 bp, synthetic construct
  source 1..20: mol_type = other DNA
gaggaagtagctacagtcct

SEQ ID NO: 2377 - DNA, 20 bp, synthetic construct
  source 1..20: mol_type = other DNA
tgaggaagtagctacagtcc

SEQ ID NO: 2378 - DNA, 20 bp, synthetic construct
  source 1..20: mol_type = other DNA
ctgaggaagtagctacagtc

SEQ ID NO: 2379 - DNA, 20 bp, synthetic construct
  source 1..20: mol_type = other DNA
tacagtcctccgctctacca

SEQ ID NO: 2380 - DNA, 20 bp, synthetic construct
  source 1..20: mol_type = other DNA
ctacagtcctccgctctacc

SEQ ID NO: 2381 - DNA, 20 bp, synthetic construct
  source 1..20: mol_type = other DNA
cctacagtcctccgctctac

SEQ ID NO: 2382 - DNA, 20 bp, synthetic construct
  source 1..20: mol_type = other DNA
gcctacagtcctccgctcta

SEQ ID NO: 2383 - DNA, 20 bp, synthetic construct
  source 1..20: mol_type = other DNA
cgcctacagtcctccgctct

SEQ ID NO: 2384 - DNA, 20 bp, synthetic construct
  source 1..20: mol_type = other DNA
gcgcctacagtcctccgctc

SEQ ID NO: 2385 - DNA, 20 bp, synthetic construct
  source 1..20: mol_type = other DNA
cgcgcctacagtcctccgct

SEQ ID NO: 2386 - DNA, 20 bp, synthetic construct
  source 1..20: mol_type = other DNA
gcgcgcctacagtcctccgc

SEQ ID NO: 2387 - DNA, 20 bp, synthetic construct
  source 1..20: mol_type = other DNA
cgcgcgcctacagtcctccg

SEQ ID NO: 2388 - DNA, 20 bp, synthetic construct
  source 1..20: mol_type = other DNA
gcgcgcgcctacagtcctcc

SEQ ID NO: 2389 - DNA, 20 bp, synthetic construct
  source 1..20: mol_type = other DNA
ggcgcgcgcctacagtcctc

SEQ ID NO: 2390 - DNA, 20 bp, synthetic construct
  source 1..20: mol_type = other DNA
gggcgcgcgcctacagtcct

SEQ ID NO: 2391 - DNA, 20 bp, synthetic construct
  source 1..20: mol_type = other DNA
cgggcgcgcgcctacagtcc

SEQ ID NO: 2392 - DNA, 20 bp, synthetic construct
  source 1..20: mol_type = other DNA
acgggcgcgcgcctacagtc

SEQ ID NO: 2393 - DNA, 20 bp, synthetic construct
  source 1..20: mol_type = other DNA
tacagtcctccgctctacca

SEQ ID NO: 2394 - DNA, 20 bp, synthetic construct
  source 1..20: mol_type = other DNA
ctacagtcctccgctctacc

SEQ ID NO: 2395 - DNA, 20 bp, synthetic construct
  source 1..20: mol_type = other DNA
gctacagtcctccgctctac

SEQ ID NO: 2396 - DNA, 20 bp, synthetic construct
  source 1..20: mol_type = other DNA
ggctacagtcctccgctcta

SEQ ID NO: 2397 - DNA, 20 bp, synthetic construct
  source 1..20: mol_type = other DNA
aggctacagtcctccgctct

SEQ ID NO: 2398 - DNA, 20 bp, synthetic construct
  source 1..20: mol_type = other DNA
caggctacagtcctccgctc

SEQ ID NO: 2399 - DNA, 20 bp, synthetic construct
  source 1..20: mol_type = other DNA
acaggctacagtcctccgct

SEQ ID NO: 2400 - DNA, 20 bp, synthetic construct
  source 1..20: mol_type = other DNA
tacaggctacagtcctccgc

SEQ ID NO: 2401 - DNA, 20 bp, synthetic construct
  source 1..20: mol_type = other DNA
ctacaggctacagtcctccg

SEQ ID NO: 2402 - DNA, 20 bp, synthetic construct
  source 1..20: mol_type = other DNA
tctacaggctacagtcctcc

SEQ ID NO: 2403 - DNA, 20 bp, synthetic construct
  source 1..20: mol_type = other DNA
ttctacaggctacagtcctc

SEQ ID NO: 2404 - DNA, 20 bp, synthetic construct
  source 1..20: mol_type = other DNA
tttctacaggctacagtcct

SEQ ID NO: 2405 - DNA, 20 bp, synthetic construct
  source 1..20: mol_type = other DNA
gtttctacaggctacagtcc

SEQ ID NO: 2406 - DNA, 20 bp, synthetic construct
  source 1..20: mol_type = other DNA
tgtttctacaggctacagtc

SEQ ID NO: 2407 - DNA, 20 bp, synthetic construct
  source 1..20: mol_type = other DNA
tacagtcctccgctctacca

SEQ ID NO: 2408 - DNA, 20 bp, synthetic construct
  source 1..20: mol_type = other DNA
ctacagtcctccgctctacc

SEQ ID NO: 2409 - DNA, 20 bp, synthetic construct
  source 1..20: mol_type = other DNA
tctacagtcctccgctctac

SEQ ID NO: 2410 - DNA, 20 bp, synthetic construct
  source 1..20: mol_type = other DNA
atctacagtcctccgctcta

SEQ ID NO: 2411 - DNA, 20 bp, synthetic construct
  source 1..20: mol_type = other DNA
aatctacagtcctccgctct

SEQ ID NO: 2412 - DNA, 20 bp, synthetic construct
  source 1..20: mol_type = other DNA
caatctacagtcctccgctc

SEQ ID NO: 2413 - DNA, 20 bp, synthetic construct
  source 1..20: mol_type = other DNA
acaatctacagtcctccgct

SEQ ID NO: 2414 - DNA, 20 bp, synthetic construct
  source 1..20: mol_type = other DNA
tacaatctacagtcctccgc

SEQ ID NO: 2415 - DNA, 20 bp, synthetic construct
  source 1..20: mol_type = other DNA
gtacaatctacagtcctccg

SEQ ID NO: 2416 - DNA, 20 bp, synthetic construct
  source 1..20: mol_type = other DNA
tgtacaatctacagtcctcc

SEQ ID NO: 2417 - DNA, 20 bp, synthetic construct
  source 1..20: mol_type = other DNA
ctgtacaatctacagtcctc

SEQ ID NO: 2418 - DNA, 20 bp, synthetic construct
  source 1..20: mol_type = other DNA
tctgtacaatctacagtcct

SEQ ID NO: 2419 - DNA, 20 bp, synthetic construct
  source 1..20: mol_type = other DNA
gtctgtacaatctacagtcc

SEQ ID NO: 2420 - DNA, 20 bp, synthetic construct
  source 1..20: mol_type = other DNA
tgtctgtacaatctacagtc

SEQ ID NO: 2421 - DNA, 20 bp, synthetic construct
  source 1..20: mol_type = other DNA
tacagtcctccgctctacca

SEQ ID NO: 2422 - DNA, 20 bp, synthetic construct
  source 1..20: mol_type = other DNA
ctacagtcctccgctctacc

SEQ ID NO: 2423 - DNA, 20 bp, synthetic construct
  source 1..20: mol_type = other DNA
actacagtcctccgctctac

SEQ ID NO: 2424 - DNA, 20 bp, synthetic construct
  source 1..20: mol_type = other DNA
tactacagtcctccgctcta

SEQ ID NO: 2425 - DNA, 20 bp, synthetic construct
  source 1..20: mol_type = other DNA
gtactacagtcctccgctct

SEQ ID NO: 2426 - DNA, 20 bp, synthetic construct
  source 1..20: mol_type = other DNA
agtactacagtcctccgctc

SEQ ID NO: 2427 - DNA, 20 bp, synthetic construct
  source 1..20: mol_type = other DNA
aagtactacagtcctccgct

SEQ ID NO: 2428 - DNA, 20 bp, synthetic construct
  source 1..20: mol_type = other DNA
taagtactacagtcctccgc

SEQ ID NO: 2429 - DNA, 20 bp, synthetic construct
  source 1..20: mol_type = other DNA
ttaagtactacagtcctccg

SEQ ID NO: 2430 - DNA, 20 bp, synthetic construct
  source 1..20: mol_type = other DNA
attaagtactacagtcctcc

SEQ ID NO: 2431 - DNA, 20 bp, synthetic construct
  source 1..20: mol_type = other DNA
cattaagtactacagtcctc

SEQ ID NO: 2432 - DNA, 20 bp, synthetic construct
  source 1..20: mol_type = other DNA
acattaagtactacagtcct

SEQ ID NO: 2433 - DNA, 20 bp, synthetic construct
  source 1..20: mol_type = other DNA
cacattaagtactacagtcc

SEQ ID NO: 2434 - DNA, 20 bp, synthetic construct
  source 1..20: mol_type = other DNA
acacattaagtactacagtc

SEQ ID NO: 2435 - DNA, 20 bp, synthetic construct
  source 1..20: mol_type = other DNA
tacagtcctccgctctacca

SEQ ID NO: 2436 - DNA, 20 bp, synthetic construct
  source 1..20: mol_type = other DNA
ctacagtcctccgctctacc

SEQ ID NO: 2437 - DNA, 20 bp, synthetic construct
  source 1..20: mol_type = other DNA
cctacagtcctccgctctac

SEQ ID NO: 2438 - DNA, 20 bp, synthetic construct
  source 1..20: mol_type = other DNA
ccctacagtcctccgctcta

SEQ ID NO: 2439 - DNA, 20 bp, synthetic construct
  source 1..20: mol_type = other DNA
cccctacagtcctccgctct

SEQ ID NO: 2440 - DNA, 20 bp, synthetic construct
  source 1..20: mol_type = other DNA
acccctacagtcctccgctc

SEQ ID NO: 2441 - DNA, 20 bp, synthetic construct
  source 1..20: mol_type = other DNA
aacccctacagtcctccgct

SEQ ID NO: 2442 - DNA, 20 bp, synthetic construct
  source 1..20: mol_type = other DNA
aaacccctacagtcctccgc

SEQ ID NO: 2443 - DNA, 20 bp, synthetic construct
  source 1..20: mol_type = other DNA
caaacccctacagtcctccg

SEQ ID NO: 2444 - DNA, 20 bp, synthetic construct
  source 1..20: mol_type = other DNA
tcaaacccctacagtcctcc

SEQ ID NO: 2445 - DNA, 20 bp, synthetic construct
  source 1..20: mol_type = other DNA
ttcaaacccctacagtcctc

SEQ ID NO: 2446 - DNA, 20 bp, synthetic construct
  source 1..20: mol_type = other DNA
attcaaacccctacagtcct

SEQ ID NO: 2447 - DNA, 20 bp, synthetic construct
  source 1..20: mol_type = other DNA
cattcaaacccctacagtcc

SEQ ID NO: 2448 - DNA, 20 bp, synthetic construct
  source 1..20: mol_type = other DNA
acattcaaacccctacagtc

SEQ ID NO: 2449 - DNA, 20 bp, synthetic construct
  source 1..20: mol_type = other DNA
tacagtcctccgctctacca

SEQ ID NO: 2450 - DNA, 20 bp, synthetic construct
  source 1..20: mol_type = other DNA
ctacagtcctccgctctacc

SEQ ID NO: 2451 - DNA, 20 bp, synthetic construct
  source 1..20: mol_type = other DNA
tctacagtcctccgctctac

SEQ ID NO: 2452 - DNA, 20 bp, synthetic construct
  source 1..20: mol_type = other DNA
gtctacagtcctccgctcta

SEQ ID NO: 2453 - DNA, 20 bp, synthetic construct
  source 1..20: mol_type = other DNA
agtctacagtcctccgctct

SEQ ID NO: 2454 - DNA, 20 bp, synthetic construct
  source 1..20: mol_type = other DNA
cagtctacagtcctccgctc

SEQ ID NO: 2455 - DNA, 20 bp, synthetic construct
  source 1..20: mol_type = other DNA
gcagtctacagtcctccgct

SEQ ID NO: 2456 - DNA, 20 bp, synthetic construct
  source 1..20: mol_type = other DNA
cgcagtctacagtcctccgc

SEQ ID NO: 2457 - DNA, 20 bp, synthetic construct
  source 1..20: mol_type = other DNA
ccgcagtctacagtcctccg

SEQ ID NO: 2458 - DNA, 20 bp, synthetic construct
  source 1..20: mol_type = other DNA
tccgcagtctacagtcctcc

SEQ ID NO: 2459 - DNA, 20 bp, synthetic construct
  source 1..20: mol_type = other DNA
ttccgcagtctacagtcctc

SEQ ID NO: 2460 - DNA, 20 bp, synthetic construct
  source 1..20: mol_type = other DNA
tttccgcagtctacagtcct

SEQ ID NO: 2461 - DNA, 20 bp, synthetic construct
  source 1..20: mol_type = other DNA
gtttccgcagtctacagtcc

SEQ ID NO: 2462 - DNA, 20 bp, synthetic construct
  source 1..20: mol_type = other DNA
cgtttccgcagtctacagtc

SEQ ID NO: 2463 - DNA, 20 bp, synthetic construct
  source 1..20: mol_type = other DNA
tacagtcctccgctctacca

SEQ ID NO: 2464 - DNA, 20 bp, synthetic construct
  source 1..20: mol_type = other DNA
ctacagtcctccgctctacc

SEQ ID NO: 2465 - DNA, 20 bp, synthetic construct
  source 1..20: mol_type = other DNA
cctacagtcctccgctctac

SEQ ID NO: 2466 - DNA, 20 bp, synthetic construct
  source 1..20: mol_type = other DNA
acctacagtcctccgctcta

SEQ ID NO: 2467 - DNA, 20 bp, synthetic construct
  source 1..20: mol_type = other DNA
aacctacagtcctccgctct

SEQ ID NO: 2468 - DNA, 20 bp, synthetic construct
  source 1..20: mol_type = other DNA
gaacctacagtcctccgctc

SEQ ID NO: 2469 - DNA, 20 bp, synthetic construct
  source 1..20: mol_type = other DNA
tgaacctacagtcctccgct

SEQ ID NO: 2470 - DNA, 20 bp, synthetic construct
  source 1..20: mol_type = other DNA
atgaacctacagtcctccgc

SEQ ID NO: 2471 - DNA, 20 bp, synthetic construct
  source 1..20: mol_type = other DNA
aatgaacctacagtcctccg

SEQ ID NO: 2472 - DNA, 20 bp, synthetic construct
  source 1..20: mol_type = other DNA
taatgaacctacagtcctcc

SEQ ID NO: 2473 - DNA, 20 bp, synthetic construct
  source 1..20: mol_type = other DNA
ttaatgaacctacagtcctc

SEQ ID NO: 2474 - DNA, 20 bp, synthetic construct
  source 1..20: mol_type = other DNA
tttaatgaacctacagtcct

SEQ ID NO: 2475 - DNA, 20 bp, synthetic construct
  source 1..20: mol_type = other DNA
gtttaatgaacctacagtcc

SEQ ID NO: 2476 - DNA, 20 bp, synthetic construct
  source 1..20: mol_type = other DNA
agtttaatgaacctacagtc

SEQ ID NO: 2477 - DNA, 20 bp, synthetic construct
  source 1..20: mol_type = other DNA
tacagtcctccgctctacca

SEQ ID NO: 2478 - DNA, 20 bp, synthetic construct
  source 1..20: mol_type = other DNA
ctacagtcctccgctctacc

SEQ ID NO: 2479 - DNA, 20 bp, synthetic construct
  source 1..20: mol_type = other DNA
cctacagtcctccgctctac

SEQ ID NO: 2480 - DNA, 20 bp, synthetic construct
  source 1..20: mol_type = other DNA
acctacagtcctccgctcta

SEQ ID NO: 2481 - DNA, 20 bp, synthetic construct
  source 1..20: mol_type = other DNA
cacctacagtcctccgctct

SEQ ID NO: 2482 - DNA, 20 bp, synthetic construct
  source 1..20: mol_type = other DNA
gcacctacagtcctccgctc

SEQ ID NO: 2483 - DNA, 20 bp, synthetic construct
  source 1..20: mol_type = other DNA
tgcacctacagtcctccgct

SEQ ID NO: 2484 - DNA, 20 bp, synthetic construct
  source 1..20: mol_type = other DNA
gtgcacctacagtcctccgc

SEQ ID NO: 2485 - DNA, 20 bp, synthetic construct
  source 1..20: mol_type = other DNA
cgtgcacctacagtcctccg

SEQ ID NO: 2486 - DNA, 20 bp, synthetic construct
  source 1..20: mol_type = other DNA
gcgtgcacctacagtcctcc

SEQ ID NO: 2487 - DNA, 20 bp, synthetic construct
  source 1..20: mol_type = other DNA
ggcgtgcacctacagtcctc

SEQ ID NO: 2488 - DNA, 20 bp, synthetic construct
  source 1..20: mol_type = other DNA
gggcgtgcacctacagtcct

SEQ ID NO: 2489 - DNA, 20 bp, synthetic construct
  source 1..20: mol_type = other DNA
cgggcgtgcacctacagtcc

SEQ ID NO: 2490 - DNA, 20 bp, synthetic construct
  source 1..20: mol_type = other DNA
acgggcgtgcacctacagtc

SEQ ID NO: 2491 - RNA, 76 nt, synthetic construct
  source 1..76: mol_type = other RNA
  modified_base 10: mod_base = m2g
  modified_base 16..17: mod_base = OTHER; note = 5,6-dihydrouridine
  modified_base 26: mod_base = OTHER; note = N2-dimethylguanosine
  modified_base 32: mod_base = cm
  modified_base 34: mod_base = gm
  modified_base 37: mod_base = yw
  modified_base 39: mod_base = p
  modified_base 40: mod_base = m5c
  modified_base 46: mod_base = m7g
  modified_base 49: mod_base = m5c
  modified_base 55: mod_base = p
  modified_base 58: mod_base = m1a
  modified_base 54: mod_base = m5u
gcggatttanctcagnngggagagcnccagantnaananntggagntcntgtgnncgntccacagaattcgcacca

What is claimed is:

1. A method for editing a DNA sequence encoding an endogenous tRNA at a target site, the method comprising contacting the DNA sequence at the target site with a base editor and guide RNA, wherein the base editor installs a mutation at the target site, relative to the unedited DNA sequence, thus converting the encoded tRNA into an encoded suppressor tRNA.

2. A method for editing a DNA sequence encoding an endogenous tRNA at a target site, the method comprising contacting the DNA sequence at the target site with a base editor and guide RNA, wherein the base editor installs a mutation at the target site, relative to the unedited DNA sequence, thus converting the encoded tRNA into an encoded suppressor tRNA, wherein the DNA sequence is any sequence listed in Table 1.

3. The method of claims 1 or 2, wherein the DNA sequence encoding the tRNA molecule is a redundant and dispensable DNA sequence.

4. The method of any one of claims 1-3, wherein the target site in the DNA sequence encodes one or more domains of the tRNA.

5. The method of any one of claim 4, wherein the domain is a D-arm domain of the tRNA molecule.

6. The method of claims 4 or 5, wherein the domain is a variable arm domain of the tRNA molecule.

7. The method of any one of claims 4-6, wherein domain is a T-arm domain of the tRNA molecule.

8. The method of any one of claim 4-7, wherein the domain is an anticodon sequence of the tRNA molecule.

9. The method of claim 8, wherein the tRNA anticodon comprises the sequence 3′-X1-X2-X3-5′.

10. The method of claim 9, wherein the mutation is a single transition mutation (e.g., base substitution) in the DNA sequence encoding the tRNA anticodon, wherein the single transition mutation converts the encoded tRNA anticodon sequence into an encoded nonsense suppressor anticodon sequence.

11. The method of claim 10, wherein the single transition mutation is selected from the groups consisting of a C>T mutation, T>C mutation, A>G mutation, and G>A mutation.

12. The method of any one of claims 8-11, wherein the mutation is a single transversion mutation (e.g., base substitution) in the DNA sequence encoding the tRNA anticodon, wherein the single transversion mutation converts the encoded endogenous tRNA anticodon sequence into an encoded nonsense suppressor anticodon sequence.

13. The method of claim 12, wherein the single transversion mutation is selected from the group consisting of an A>C mutation, T>G mutation, G>T mutation, C>A mutation, C>G mutation, G>C mutation, A>T mutation, and T>A mutation.

14. The method of any one of claims 9-13, wherein the mutation occurs at X1 and is selected from the group consisting of G>A, C>A, and U>A, relative to the unedited DNA sequence.

15. The method of claim 14, wherein X2 is C and X3 is U.

16. The method of claim 14, wherein X2 is U and X3 is C.

17. The method of claim 14, wherein X2 is U and X3 is U.

18. The method of any one of claims 9-17, wherein the mutation occurs at X2 and is selected from the group consisting of A>C, G>C, and U>C, relative to the unedited DNA sequence.

19. The method of claim 18, wherein X1 is A and X3 is U.

20. The method of any one of claims 9-19, wherein the mutation occurs at X2 and is selected from the group consisting of A>U, G>U, or C>U, relative to the unedited DNA sequence.

21. The method of claim 20, wherein X1 is A, and X3 is C.

22. The method of claim 20, wherein X1 is A and X3 is U.

23. The method of any one of claims 9-22, wherein the mutation occurs at X3 and is selected from the group consisting of A>U, G>U, and C>U.

24. The method of claim 23, wherein X1 is A and X2 is C.

25. The method of claim 23, wherein X1 is A and X2 is U.

26. The method of any one of claims 9-25, wherein the mutation occurs at X3 and is selected from the group consisting of U>C, A>C, and G>C.

27. The method of claim 26, wherein X1 is A and X2 is U.

28. The method of any one of claims 10-27, wherein the nonsense suppressor anticodon is 5′-UUA-3′.

29. The method of any one of claims 10-28, wherein the nonsense suppressor anticodon is 5′-UCA-3′.

30. The method of any one of claims 10-29, wherein the nonsense suppressor anticodon is 5′-CUA-3′.

31. The method of any one of claims 10-30, wherein the nonsense suppressor anticodon is configured to bind to a premature termination codon sequence.

32. The method of claim 31, wherein the premature termination codon sequence is 5′-UAA-3′.

33. The method of claims 31 or 32, wherein the premature termination codon sequence is 5′-UGA-3′.

34. The method of any one of claims 31-33, wherein the premature termination codon sequence is 5′-UAG-3′.

35. The method of any one of claims 4-34, wherein the domain is an acceptor stem domain of the tRNA molecule.

36. The method of claim 35, wherein the acceptor stem domain comprises a mutation that changes the identity of an amino acid charged to the tRNA.

37. The method of claim 36, wherein the mutation is a C70U mutation.

38. The method of claims 36 or 37, wherein the mutation charges the tRNA with an alanine.

39. The method of any one of claims 1-38, wherein the gRNA comprises a spacer sequence with at least 90%, at least 95%, at least 98%, at least 99%, at least 99.5%, or at least 99.8% sequence identity to any sequence listed in Table 2.

40. A method for installing one or more edits in a DNA sequence encoding an endogenous tRNA at one or more target sites, the method comprising contacting the DNA sequence at the one or more target sites with one or more base editors and one or more guide RNAs, wherein the one or more base editors install a base substitution at the one or more target sites, relative to the unedited DNA sequence.

41. The method of claim 40, wherein the base substitution is a single transition substitution in the DNA sequence encoding an anticodon sequence of the endogenous tRNA.

42. The method of claim 41, wherein the single transition mutation is selected from the groups consisting of a C>T mutation, T>C mutation, A>G mutation, and G>A mutation.

43. The method of any one of claims 40-42, wherein the base substitution is a single transversion substitution in the DNA sequence encoding the anticodon sequence of the endogenous tRNA.

44. The method of claim 43, wherein the single transversion mutation is selected from the group consisting of an A>C mutation, T>G mutation, G>T mutation, C>A mutation, C>G mutation, G>C mutation, A>T mutation, and T>A mutation.

45. The method any one of claims 40-44, wherein the one or more base editors install the one or more edits a the one or more target sites sequentially.

46. The method of any one of claims 40-45, wherein the one or more base editors install the one or more edits at the one or more target sites simultaneously.

47. An edited tRNA, wherein the edited tRNA comprises a nonsense suppressor anticodon sequence.

48. The edited tRNA of claim 47, wherein the edited tRNA is charged with an amino acid selected from the group consisting of alanine, arginine, asparagine, aspartic acid, cysteine, glutamine, glutamic acid, glycine, histidine, isoleucine, leucine, methionine, phenylalanine, proline, serine, threonine, tryptophan, tyrosine, valine, pyrrolysine, and selenocysteine.

49. The edited tRNA of claims 47 or 48, wherein the edited tRNA is charged with a non-natural amino acid.

50. The edited tRNA of any one of claims 47-49, wherein the nonsense suppressor anticodon is selected from the group consisting of 5′-UUA-3′, 5′-UCA-3′, and 5′-CUA-3′.

51. A composition comprising a base editor and a guide RNA (gRNA), wherein the gRNA is configured to bind to a DNA sequence encoding an endogenous tRNA.

52. The composition of claim 51, wherein spacer sequence comprises at least 90%, at least 95%, at least 98%, at least 99%, at least 99.5%, or at least 99.8% sequence identity to any sequence listed in Table 2.

53. A gRNA comprising a spacer sequence that binds to a complementary strand of a target DNA and a gRNA core that mediates binding of a base editor to the DNA, wherein the gRNA is configured to bind to a DNA sequence encoding an endogenous tRNA.

54. The gRNA of claim 53, wherein spacer sequence comprises at least 90%, at least 95%, at least 98%, at least 99%, at least 99.5%, or at least 99.8% sequence identity to any sequence listed in Table 2.

55. A complex comprising a base editor and a gRNA, wherein the gRNA comprises a spacer sequence, wherein the spacer sequence is configured to bind to a DNA sequence encoding an endogenous tRNA.

56. The complex of claim 55, wherein spacer sequence comprises at least 90%, at least 95%, at least 98%, at least 99%, at least 99.5%, or at least 99.8% sequence identity to any sequence listed in Table 2.

57. A polynucleotide comprising a first nucleic acid sequence encoding a guide RNA (gRNA), wherein the gRNA is configured to bind to a DNA sequence encoding an endogenous tRNA.

58. The polynucleotide of claim 57, wherein the gRNA comprises a spacer sequence with at least 90%, at least 95%, at least 98%, at least 99%, at least 99.5%, or at least 99.8% sequence identity to any sequence listed in Table 2.

59. A cell comprising a polynucleotide of claims 57 or 58, a complex of claims 55 or 56, a gRNA of claims 53 or 54, or any combination thereof.

60. The cell of claim 59, wherein the cell is an animal cell.

61. The cell of claim 60, wherein the animal cell is a mammalian cell, a non-human primate cell, or a human cell.

62. The cell of claim 59, wherein the cell is a plant cell.

63. A pharmaceutical composition comprising a gRNA of claims 53 or 54, a complex of claims 55 or 56, a polynucleotide of claims 57 or 58, a cell of any one of claims 56-59, or any combination thereof, and a pharmaceutical excipient.

64. A kit comprising a gRNA of claims 53 or 54, a complex of claim 53, a complex of claims 55 or 56, a polynucleotide of claims 57 or 58, a cell of any one of claims 56-59, or a composition of claim 63, and instructions for editing one or more DNA sequences encoding one or more domains of a tRNA by base editing.

65. A method for producing a suppressor tRNA molecules from an endogenous tRNA molecule using base editing in a subject in need thereof, the method comprising administering to the subject: (i) a base editor and (ii) a guide RNA, wherein the base editor and the gRNA install a mutation at a target site in a DNA sequence encoding the tRNA molecule, wherein installation of the mutation converts the endogenous tRNA molecule into the suppressor tRNA molecule.

66. A method for changing the amino acid that is charged onto a tRNA in a subject in need thereof, the method comprising administering to the subject: (i) a base editor and (ii) a guide RNA (gRNA), wherein the base editor and gRNA form a base editing complex, wherein the base editing complex binds to a DNA sequence encoding an acceptor stem domain of the tRNA, wherein the base editing complex installs a mutation in the DNA sequence encoding the acceptor stem domain, and wherein the mutation results in the replacement of a cognate amino acid with a non-cognate amino acid.

67. The method of claim 66, wherein the target site of the DNA sequence encodes a D-arm domain of the tRNA molecule.

68. The method of claims 66 or 67, wherein the target site of the DNA sequence encodes a variable arm domain of the tRNA molecule.

69. The method of any one of claims 66-68, wherein the target site of the DNA sequence encodes a T-arm domain of the tRNA molecule.

70. The method of any one of claims 66-69, wherein the target site in the DNA sequence encodes an acceptor stem domain of the tRNA molecule.

71. The method of any one of claims 66-70, wherein the mutation comprises a transition mutation.

72. The method of claim 71, wherein the transition mutation is a C70U mutation in the acceptor stem domain of the tRNA molecule.

73. The method of claim 72, wherein the C70U mutation results in replacing the cognate amino acid with the non-cognate amino acid alanine.

74. A method for treating a disease caused by premature termination codons in a subject in need thereof, the method comprising administering to the subject (i) a base editor and (ii) a guide RNA, wherein the base editor and guide RNA form a base editor complex, wherein the base editor complex mutates a target DNA sequence encoding one or more domains of a tRNA to produce a suppressor tRNA, wherein the suppressor tRNA comprises an anticodon sequence complementary to an ochre stop codon, an opal stop codon, or an amber stop codon.

75. The method of claim 74, wherein the one or more domains comprises an anticodon sequence.

76. The method of claim 75, wherein the tRNA anticodon sequence has the general formula: 3′-X1-X2-X3-5′ and wherein X1, X2, and X3 are selected from the group consisting of A, C, G, and U.

77. The method of claim 76, wherein the mutation occurs at X1 and is selected from the group consisting of G>A, C>A, or U>A, relative to the unedited tRNA.

78. The method of claim 77, wherein X2 is C and X3 is U.

79. The method of claims 77 or 78, wherein X2 is U and X3 is C.

80. The method of any one of claims 77-79, wherein X2 is U and X3 is U.

81. The method of any one of claims 76-80, wherein the mutation occurs at X2 and is selected from the group consisting of A>C, G>C, and U>C, relative to the unedited tRNA.

82. The method of claim 81, wherein X1 is A and X3 is U.

83. The method of any one of claims 76-82, wherein the mutation occurs at X2 and is selected from the group consisting of A>U, G>U, or C>U, relative to the unedited tRNA.

84. The method of claim 83, wherein X1 is A, and X3 is C.

85. The method of claim 83 or 84, wherein X1 is A and X3 is U.

86. The method of any one of claims 76-85, wherein the mutation occurs at X3 and is selected from the group consisting of A>U, G>U, and C>U.

87. The method of claim 86, wherein X1 is A and X2 is C.

88. The method of claim 86 or 87, wherein X1 is A and X2 is U.

89. The method of any one of claims 76-88, wherein the mutation occurs at X3 and is selected from the group consisting of U>C, A>C, and G>C.

90. The method of claim 89, wherein X1 is A and X2 is U.

91. The method of claim 74-90, wherein the anticodon sequence complementary to the ochre stop codon is 5′-UUA-3′.

92. The method of claim 74-91, wherein the anticodon sequence complementary to the opal stop codon is 5′-UCA-3′.

93. The method of claim 74-92, wherein the anticodon sequence complementary to the amber stop codon is 5′-CUA-3′.

94. The method of claim 74-93, wherein the disease is selected from the group consisting of cystic fibrosis, beta thalassaemia, Hurler syndrome, Dravet syndrome, Duchenne muscular dystrophy, Usher syndrome, and hemophilia.

95. A method of editing a DNA sequence encoding an endogenous tRNA into a DNA sequence encoding a suppressor tRNA using a virus-like particle (VLP), wherein the VLP comprises a group-specific antigen (gag) protease (pro) polyprotein and a fusion protein, wherein the gag-pro polyprotein and the fusion protein are encapsulated by a lipid membrane and a viral envelope glycoprotein, and wherein the fusion protein comprises:
(i) a gag nucleocapsid protein;
(ii) a nuclear export sequence (NES);
(iii) a cleavable linker;
(iv) a nucleic acid programmable DNA binding protein (napDNAbp); and
(v) at least one domain comprising enzymatic activity.

96. The method of claim 95, wherein the napDNAbp is a Cas9 protein.

97. The method of claim 96, wherein the Cas9 protein is a Cas9 nickase.

98. The method of any one of claims 95-97, wherein the at least one domain is a adenine deaminase domain.

99. The method of any one of claims 95-98, wherein the at least one domain is a cytidine deaminase domain.

100. The method of any one of claims 95-99, wherein the at least one domain is a adenine oxidase domain.

101. The method of any one of claims 95-100, wherein the at least one domain is a guanine oxidase domain.

102. The method of any one of claims 95-101, where the at least one domain is a guanine methyltransferases domain.

103. The method of any one of claims 95-102, wherein the at least one domain is a transglycosylase domain.

104. The method of any one of claims 95-103, wherein the at least one domain is an adenosine methyltransferase domain.

105. The method of any one of claims 95-104, wherein the at least one domain is a glycosylase domain.

106. The method of any one of claims 95-105, wherein the at least one domain is a thymine alkyltransferase domain.

107. The method of any one of claims 96-106, wherein the Cas9 protein is bound to a guide RNA (gRNA).

108. The method of any one of claims 95-107, wherein the fusion protein comprises a prime editor.

109. The method of claim 108, wherein the prime editor comprises PE2, PE3, PE4, PE5, PE2max, PE3max, PE4max, or PE5max.
